(19) United States
(12) Patent Application Publication
(10) Pub. No.: US 2024/0301416 A1
(43) Pub. Date: Sep. 12, 2024

(54) Combination of Antisense Oligomers

(71) Applicants: NIPPON SHINYAKU CO., LTD., Kyoto-Shi, Kyoto (JP); NATIONAL CENTER OF NEUROLOGY AND PSYCHIATRY, Kodaira-Shi, Tokyo (JP)

(72) Inventors: Yuichiro Tone, Kyoto-Shi, Kyoto (JP); Yoshitsugu Aoki, Kodaira-Shi, Tokyo (JP); Norio Motohashi, Kodaira-Shi, Tokyo (JP)

(73) Assignees: NIPPON SHINYAKU CO., LTD., Kyoto-Shi, Kyoto (JP); NATIONAL CENTER OF NEUROLOGY AND PSYCHIATRY, Kodaira-Shi, Tokyo (JP)

(21) Appl. No.: 18/570,778

(22) PCT Filed: Jun. 23, 2022
(86) PCT No.: PCT/JP22/25120

§ 371 Date: Dec. 15, 2023

(30) Foreign Application Priority Data
Jun. 23, 2021 (JP) 2021-104145

(51) Int. Cl. C12N 15/113; A61P 21/00

(52) U.S. Cl. CPC C12N 15/113; A61P 21/00; C12N 2310/11; C12N 2310/314; C12N 2310/321; C12N 2310/3233; C12N 2320/33

(57) ABSTRACT

Herein, a combination of antisense oligomers or pharmaceutically acceptable salts thereof, or hydrates thereof which cause simultaneous skipping of any two or more numerically consecutive exons selected from the group consisting of the 45th exon to the 55th exon in human dystrophin pre-mRNA is provided.

### TECHNICAL FIELD

[0001] The present invention relates to a pharmaceutical composition or a pharmaceutical combination for use in treatment of muscular dystrophy, a method for treatment of muscular dystrophy, and the like.

### BACKGROUND ART

[0002] In recent years, exon skipping therapy has received attention which involves causing exon skipping of a gene having a mutation that causes a disease so that a protein having partial functions arises, thereby treating the disease. Examples of the disease that may be treated by such exon skipping therapy include Duchenne muscular dystrophy (DMD).

[0003] DMD is the most frequent form of hereditary progressive muscular disease that affects one in about 3,500 newborn boys. Although DMD patients exhibit motor functions rarely different from healthy humans in their infancy and childhood, muscle weakness is observed in children from around 4 to 5 years old. Then, muscle weakness in DMD patients progresses with age to the loss of ambulation by about 12 years old and death due to cardiac or respiratory insufficiency in the twenties. Therefore, it has been strongly desired to develop an effective therapeutic agent.

[0004] DMD is known to be caused by a mutation in the dystrophin gene. The dystrophin gene is located on X chromosome and is a huge gene consisting of 2.2 million DNA base pairs. DNA is transcribed into pre-mRNA, and introns are removed by splicing to synthesize mRNA of 13, 993 bases in which 79 exons are joined together. This mRNA is translated into 3,685 amino acids to produce dystrophin protein. The dystrophin protein is associated with the maintenance of membrane stability in muscle cells and necessary to make muscle cells less fragile. Patients with DMD have a mutation in the dystrophin gene and hence, the functional dystrophin protein is rarely expressed in muscle cells of the patients. Therefore, the structure of muscle cells cannot be maintained at the time of muscle contraction in the body of the patients with DMD, leading to a large influx of calcium ions into muscle cells. Consequently, muscle cell necrosis and fibrosis progress so that muscle cells can be eventually regenerated only with difficulty.

[0005] Becker muscular dystrophy (BMD) is also caused by a mutation in the dystrophin gene. The symptoms involve muscle weakness but are typically mild and slow in the progress of muscle weakness, when compared to DMD. In many cases, its onset is in adulthood. Differences in clinical symptoms between DMD and BMD are considered to reside in whether the reading frame for amino acids on the translation of dystrophin mRNA into the dystrophin protein is disrupted by the mutation or not (Non Patent Literature 1). More specifically, in DMD, the presence of mutation shifts the amino acid reading frame so that the expression of functional dystrophin protein is abolished, whereas in BMD the dystrophin protein that is capable of functioning, though imperfectly, is produced because the amino acid reading frame is preserved, while a part of the exons are deleted by the mutation.

[0006] Exon skipping is expected to serve as a method for treating DMD. This method involves modifying splicing to restore the amino acid reading frame of dystrophin mRNA and induce expression of the dystrophin protein having the function partially restored (Non Patent Literature 2). The amino acid sequence part to be translated from an exon, which is a target for exon skipping, will be lost. For this reason, the dystrophin protein expressed by this treatment becomes shorter than normal one but since the amino acid reading frame is maintained, the function to stabilize muscle cells is partially retained. Consequently, it is expected that exon skipping will lead DMD to the similar symptoms to that of BMD which is milder. The exon skipping approach has passed the animal tests using mice or dogs and now is currently assessed in clinical trials on human DMD patients.

[0007] The skipping of an exon can be induced by binding of antisense nucleic acids targeting site (s) surrounding either 5′ or 3′ splice site or both sites, or exon-internal sites. An exon will only be included in the mRNA when both splice sites thereof are recognized by the spliceosome complex. Thus, exon skipping can be induced by targeting the sites surrounding the splice sites with antisense nucleic acids. Furthermore, the binding of an SR protein rich in serine and arginine to an exonic splicing enhancer (ESE) is considered necessary for an exon to be recognized by the splicing mechanism. Accordingly, exon skipping can also be induced by targeting ESE.

[0008] Since a mutation of the dystrophin gene may vary depending on DMD patients, antisense nucleic acids need to be designed based on the site or type of respective genetic mutation. There are a plurality of reports on an antisense nucleic acid that induces exon skipping targeting one sequence of consecutive bases for a single exon in the dystrophin gene (Patent Literatures 1 to 6 and Non Patent Literatures 1 and 2). It has also been reported that when two types of antisense nucleic acids that target the same exon in the dystrophin gene are mixed and allowed to act (dual targeting), skipping activity may be enhanced as compared to use of each antisense nucleic acid alone (Patent Literature 7).

[0009] A method called multi-exon skipping has received attention which involves causing skipping of a plurality of exons (exon group), not one exon as described above. This method enables a wide range of mutations in the dystrophin gene to be treated by exon skipping. For example, exons 45 to 55 in the dystrophin gene are known as hot spots of genetic mutation, and it has been reported that skipping of these 11 exons enables about 60% of DMD patients having a deletion mutation to be treated (Non Patent Literature 3). Most of patients congenitally lacking exons 45 to 55 are known to manifest no or mild symptoms, though developing BMD (Non Patent Literature 4). Thus, it is expected that drugs capable of inducing exon 45 to 55 skipping are promising as therapeutic agents for DMD.

[0010] For example, a method using antisense nucleic acids respectively targeting all exons in a region which is the target of exon skipping (Non Patent Literatures 5, 7, 8, and 10), a method using antisense nucleic acids respectively targeting two different exons on the 3′ side and 5′ side of a region which is the target of exon skipping (Non Patent Literatures 6 and 9 and Patent Literatures 8, 9, and 11), and a method using an antisense nucleic acid targeting only an exon on the 5′ side of a region which is the target of exon skipping (Patent Literature 10) have been reported as methods for inducing multi-exon skipping.

### CITATION LIST

### Patent Literature

[0011] Patent Literature 1: International Publication WO2004/048570
[0012] Patent Literature 2: International Publication W2009/139630
[0013] Patent Literature 3: International Publication W2010/048586
[0014] Patent Literature 4: U.S. Patent Publication Nos. 2010/0168212
[0015] Patent Literature 5: International Publication W2011/057350
[0016] Patent Literature 6: International Publication W2006/000057
[0017] Patent Literature 7: International Publication W2007/135105
[0018] Patent Literature 8: International Publication W2004/083446

### Non Patent Literature

[0019] Patent Literature 9: International Publication W2014/007620
[0020] Patent Literature 10: International Publication W2019/200185
[0021] Patent Literature 11: International Publication W2020/219820

### Non Patent Literature

[0022] Non Patent Literature 1: Annemieke Aartsma-Rus et al., (2002) Neuromuscular Disorders 12: S71-S77
[0023] Non Patent Literature 2: Wilton S. D., et al., Molecular Therapy 2007: 15: p. 1288-96
[0024] Non Patent Literature 3: Christophe Beroud et al., Human Mutation, 28 (2), 2007, 196-202
[0025] Non Patent Literature 4: Yusuke Echigoya et al., Molecular Therapy-Nucleic Acids, 4(2), 2015, e225
[0026] Non Patent Literature 5: Yoshitsugu Aoki et al., PNAS, 109 (34), 2012, 13763-13768
[0027] Non Patent Literature 6: Laura van Vliet et al., BMC Medical Genetics, 9, 105, 2008
[0028] Non Patent Literature 7: Joshua Lee et al., PLOS ONE, 13 (5), e0197084, 2018
[0029] Non Patent Literature 8: Joshua Lee et al., Methods in Molecular Biology, 1828, 141-150, 2018
[0030] Non Patent Literature 9: Annemieke Aartsma-Rus et al, Am. J. Hum. Genet. 74(1), 83-92, 2004
[0031] Non Patent Literature 10: Yusuke Echigoya et al., Molecular Therapy, 27 (11), 1-13, 2019

### SUMMARY OF INVENTION

### Technical Problem

[0032] The effects of drugs causing simultaneous skipping a plurality of exons (exon group) in objective pre-mRNA are not always sufficient. Under the foregoing circumstances, medicaments for treating patients having various mutations by causing simultaneous skipping of a plurality of exons (exon group) in objective pre-mRNA have been desired.

### Solution to Problem

[0033] The present invention provides a combination of antisense oligomers or pharmaceutically acceptable salts thereof, or hydrates thereof, a pharmaceutical composition, a pharmaceutical combination, a method for treatment of muscular dystrophy, and the like as follows:

(1)

[0034] A combination of antisense oligomers or pharmaceutically acceptable salts thereof, or hydrates thereof which cause simultaneous skipping of any two or more numerically consecutive exons selected from the group consisting of the 45th exon to the 55th exon in human dystrophin pre-mRNA, the combination comprising:
[0035] (i) a first antisense oligomer or a pharmaceutically acceptable salt thereof, or a hydrate thereof, comprising:
   [0036] a first unit oligomer comprising a base sequence complementary to a base sequence consisting of a base sequence of 11 bases in the upstream direction from the 3′ end of the 44th intron and a base sequence of 69 bases in the downstream direction from the 5′ end of the 45th exon in the human dystrophin pre-mRNA, or a partial base sequence thereof; and
   [0037] a second unit oligomer comprising a base sequence complementary to a base sequence of from the 52nd to 75th bases in the upstream direction from the 3′ end of the 44th intron in the human dystrophin pre-mRNA, or a partial base sequence thereof; and
[0038] (ii) a second antisense oligomer or a pharmaceutically acceptable salt thereof, or a hydrate thereof, comprising a base sequence complementary to a base sequence consisting of a base sequence of 33 bases in the upstream direction from the 3′ end of the 54th intron and a base sequence of 53 bases in the downstream direction from the 5′ end of the 55th exon in the human dystrophin pre-mRNA, or a partial base sequence thereof.
   (2)

[0039] The combination according to (1), wherein
[0040] the first unit oligomer comprises a base sequence complementary to consecutive 15 to 30 bases of a base sequence consisting of a base sequence of 11 bases in the upstream direction from the 3′ end of the 44th intron and a base sequence of 69 bases in the downstream direction from the 5′ end of the 45th exon in the human dystrophin pre-mRNA,
[0041] the second unit oligomer comprises a base sequence complementary to consecutive 1 to 10 bases of a base sequence of from the 52nd to 75th bases in the upstream direction from the 3′ end of the 44th intron in the human dystrophin pre-mRNA, and
[0042] the second antisense oligomer comprises a base sequence complementary to consecutive 15 to 30 bases of a base sequence consisting of a base sequence of 33 bases in the upstream direction from the 3′ end of the 54th intron and a base sequence of 53 bases in the downstream direction from the 5′ end of the 55th exon in the human dystrophin pre-mRNA.
   (3)

[0043] The combination according to (1) or (2), wherein
[0044] the first unit oligomer comprises a base sequence complementary to:
[0045] (a) any one base sequence selected from the group consisting of SEQ ID NOs: 211 to 906;
[0046] (b) a base sequence that hybridizes under stringent conditions to a base sequence complementary to any one base sequence selected from the group consisting of SEQ ID NOs: 211 to 906;
[0047] (c) a base sequence that has at least 85% identity with any one base sequence selected from the group consisting of SEQ ID NOs: 211 to 906, and has a length within ±15% of the length of the any one base sequence selected; or
[0048] (d) a partial base sequence of any one base sequence selected from the group consisting of the base sequences (a), (b), and (c), and/or
[0049] the second unit oligomer comprises a base sequence complementary to:
[0050] (a) any one base sequence selected from the group consisting of SEQ ID NOs: 1 to 105;
[0051] (b) a base sequence that hybridizes under stringent conditions to a base sequence complementary to any one base sequence selected from the group consisting of SEQ ID NOs: 1 to 105;
[0052] (c) a base sequence that has at least 85% identity with any one base sequence selected from the group consisting of SEQ ID NOS: 1 to 105, and has a length within ±15% of the length of the any one base sequence selected; or
[0053] (d) a partial base sequence of any one base sequence selected from the group consisting of the base sequences (a), (b), and (c).
   (4)

[0054] The combination according to any one of (1) to (3),
[0055] wherein the second antisense oligomer comprises a base sequence complementary to:
[0056] (a) any one base sequence selected from the group consisting of SEQ ID NOS: 3507 to 4298;
[0057] (b) a base sequence that hybridizes under stringent conditions to a base sequence complementary to any one base sequence selected from the group consisting of SEQ ID NOs: 3507 to 4298;
[0058] (c) a base sequence that has at least 85% identity with any one base sequence selected from the group consisting of SEQ ID NOs: 3507 to 4298, and has a length within ±15% of the length of the any one base sequence selected; or
[0059] (d) a partial base sequence of any one base sequence selected from the group consisting of the base sequences (a), (b), and (c).
   (5)

[0060] The combination according to any one of (1) to (4), wherein the first antisense oligomer comprises the first unit oligomer and the second unit oligomer from the 5′ ends in this order, the first unit oligomer comprises any one base sequence selected from SEQ ID NOs: 907 to 1602, the second unit oligomer comprises any one base sequence selected from SEQ ID NOs: 106 to 210, and the second antisense oligomer comprises any one base sequence selected from SEQ ID NOs: 4299 to 5090.

(6)

[0061] The combination according to any one of (1) to (5), wherein the first unit oligomer comprises any one base sequence selected from the group consisting of SEQ ID NOs: 1180, 1190, 1201, 1212, 1222, 1224, and 1239.

(7)

[0062] The combination according to any one of (1) to (6), wherein the second unit oligomer comprises any one base sequence selected from the group consisting of SEQ ID NOs: 114, 124, 151, 201, 203, and 205.

(8)

[0063] The combination according to (6) or (7), wherein
[0064] the first antisense oligomer comprises the first unit oligomer and the second unit oligomer from the 5′ ends in this order, and
[0065] the first unit oligomer comprises a base sequence of SEQ ID NO: 1201, and the second unit oligomer comprises a base sequence of SEQ ID NO: 151,
[0066] the first unit oligomer comprises a base sequence of SEQ ID NO: 1201, and the second unit oligomer comprises a base sequence of SEQ ID NO: 201,
[0067] the first unit oligomer comprises a base sequence of SEQ ID NO: 1201, and the second unit oligomer comprises a base sequence of SEQ ID NO: 203,
[0068] the first unit oligomer comprises a base sequence of SEQ ID NO: 1201, and the second unit oligomer comprises a base sequence of SEQ ID NO: 205,
[0069] the first unit oligomer comprises a base sequence of SEQ ID NO: 1239, and the second unit oligomer comprises a base sequence of SEQ ID NO: 114,
[0070] the first unit oligomer comprises a base sequence of SEQ ID NO: 1224, and the second unit oligomer comprises a base sequence of SEQ ID NO: 124,
[0071] the first unit oligomer comprises a base sequence of SEQ ID NO: 1180, and the second unit oligomer comprises a base sequence of SEQ ID NO: 151,
[0072] the first unit oligomer comprises a base sequence of SEQ ID NO: 1190, and the second unit oligomer comprises a base sequence of SEQ ID NO: 151,
[0073] the first unit oligomer comprises a base sequence of SEQ ID NO: 1212, and the second unit oligomer comprises a base sequence of SEQ ID NO: 151, or
[0074] the first unit oligomer comprises a base sequence of SEQ ID NO: 1222, and the second unit oligomer comprises a base sequence of SEQ ID NO: 151.
   (9)

[0075] The combination according to any one of (1) to (8), wherein the second antisense oligomer comprises a base sequence selected from the group consisting of SEQ ID NOs: 4698, 4702, 4752, 4923, 4926, 4936, and 4977.

(10)

[0076] The combination according to any one of (1) to (9), wherein
[0077] the first antisense oligomer comprises the first unit oligomer and the second unit oligomer from the 5′ ends in this order, and
[0078] the first unit oligomer comprises a base sequence of SEQ ID NO: 1201, the second unit oligomer comprises a base sequence of SEQ ID NO: 151, and the second antisense oligomer comprises a base sequence of SEQ ID NO: 4950,
[0079] the first unit oligomer comprises a base sequence of SEQ ID NO: 1201, the second unit oligomer comprises a base sequence of SEQ ID NO: 201, and the second antisense oligomer comprises a base sequence of SEQ ID NO: 4950,
[0080] the first unit oligomer comprises a base sequence of SEQ ID NO: 1201, the second unit oligomer comprises a base sequence of SEQ ID NO: 203, and the second antisense oligomer comprises a base sequence of SEQ ID NO: 4950,
[0081] the first unit oligomer comprises a base sequence of SEQ ID NO: 1201, the second unit oligomer comprises a base sequence of SEQ ID NO: 205, and the second antisense oligomer comprises a base sequence of SEQ ID NO: 4950,
[0082] the first unit oligomer comprises a base sequence of SEQ ID NO: 1239, the second unit oligomer comprises a base sequence of SEQ ID NO: 114, and the second antisense oligomer comprises a base sequence of SEQ ID NO: 4950,
[0083] the first unit oligomer comprises a base sequence of SEQ ID NO: 1224, the second unit oligomer comprises a base sequence of SEQ ID NO: 124, and the second antisense oligomer comprises a base sequence of SEQ ID NO: 4950,
[0084] the first unit oligomer comprises a base sequence of SEQ ID NO: 1180, the second unit oligomer comprises a base sequence of SEQ ID NO: 151, and the second antisense oligomer comprises a base sequence of SEQ ID NO: 4950,
[0085] the first unit oligomer comprises a base sequence of SEQ ID NO: 1190, the second unit oligomer comprises a base sequence of SEQ ID NO: 151, and the second antisense oligomer comprises a base sequence of SEQ ID NO: 4950,
[0086] the first unit oligomer comprises a base sequence of SEQ ID NO: 1212, the second unit oligomer comprises a base sequence of SEQ ID NO: 151, and the second antisense oligomer comprises a base sequence of SEQ ID NO: 4950,
[0087] the first unit oligomer comprises a base sequence of SEQ ID NO: 1222, the second unit oligomer comprises a base sequence of SEQ ID NO: 151, and the second antisense oligomer comprises a base sequence of SEQ ID NO: 4950,
[0088] the first unit oligomer comprises a base sequence of SEQ ID NO: 1201, the second unit oligomer comprises a base sequence of SEQ ID NO: 151, and the second antisense oligomer comprises a base sequence of SEQ ID NO: 4698,
[0089] the first unit oligomer comprises a base sequence of SEQ ID NO: 1201, the second unit oligomer comprises a base sequence of SEQ ID NO: 151, and the second antisense oligomer comprises a base sequence of SEQ ID NO: 4702,
[0090] the first unit oligomer comprises a base sequence of SEQ ID NO: 1201, the second unit oligomer comprises a base sequence of SEQ ID NO: 151, and the second antisense oligomer comprises a base sequence of SEQ ID NO: 4752,
[0091] the first unit oligomer comprises a base sequence of SEQ ID NO: 1201, the second unit oligomer comprises a base sequence of SEQ ID NO: 151, and the second antisense oligomer comprises a base sequence of SEQ ID NO: 4923,
[0092] the first unit oligomer comprises a base sequence of SEQ ID NO: 1201, the second unit oligomer comprises a base sequence of SEQ ID NO: 151, and the second antisense oligomer comprises a base sequence of SEQ ID NO: 4926,
[0093] the first unit oligomer comprises a base sequence of SEQ ID NO: 1201, the second unit oligomer comprises a base sequence of SEQ ID NO: 151, and the second antisense oligomer comprises a base sequence of SEQ ID NO: 4936,
[0094] the first unit oligomer comprises a base sequence of SEQ ID NO: 1201, the second unit oligomer comprises a base sequence of SEQ ID NO: 151, and the second antisense oligomer comprises a base sequence of SEQ ID NO: 4977, or
[0095] the first unit oligomer comprises a base sequence of SEQ ID NO: 1180, the second unit oligomer comprises a base sequence of SEQ ID NO: 151, and the second antisense oligomer comprises a base sequence of SEQ ID NO: 4977.
   (11)

[0096] The combination according to any one of (5) to (10), wherein the first unit oligomer comprises a base sequence of SEQ ID NO: 1201, the second unit oligomer comprises a base sequence of SEQ ID NO: 151, and the second antisense oligomer comprises a base sequence of SEQ ID NO: 4950 or 4880.

(12)

[0097] The combination according to any one of (1) to (11), further comprising:
[0098] (iii) a third antisense oligomer or a pharmaceutically acceptable salt thereof, or a hydrate thereof, comprising a base sequence complementary to a base sequence consisting of a base sequence of 23 bases in the upstream direction from the 3′ end of the 45th exon and a base sequence of 73 bases in the downstream direction from the 5′ end of the 45th intron in the human dystrophin pre-mRNA, or a partial base sequence thereof.
   (13)

[0099] The combination according to (12), wherein the third antisense oligomer comprises a base sequence complementary to consecutive 15 to 30 bases of a base sequence consisting of a base sequence of 23 bases in the upstream direction from the 3′ end of the 45th exon and a base sequence of 73 bases in the downstream direction from the 5′ end of the 45th intron in the human dystrophin pre-mRNA.

(14)

[0100] The combination according to (12) or (13), wherein
[0101] the third antisense oligomer comprises a base sequence complementary to:
[0102] (a) any one base sequence selected from the group consisting of SEQ ID NOs: 1603 to 2554;
[0103] (b) a base sequence that hybridizes under stringent conditions to a base sequence complementary to any one base sequence selected from the group consisting of SEQ ID NOs: 1603 to 2554;
[0104] (c) a base sequence that has at least 85% identity with any one base sequence selected from the group consisting of SEQ ID NOs: 1603 to 2554, and has a length within ±15% of the length of the any one base sequence selected; or
[0105] (d) a partial base sequence of any one base sequence selected from the group consisting of the base sequences (a), (b), and (c).
   (15-1)

[0106] The combination according to (14), wherein the third antisense oligomer comprises a base sequence complementary to:
[0107] (a) any one base sequence selected from the group consisting of SEQ ID NOs: 1611 to 1654, 1664 to 1707, 1718 to 1761, 1773 to 1816, 1829 to 1872, 1886 to 1929, 1944 to 1987, 2003 to 2046, 2063 to 2106, 2124 to 2167, 2186 to 2229, 2249 to 2292, 2313 to 2356, 2378 to 2421, 2444 to 2487, and 2511 to 2554;
[0108] (b) a base sequence that hybridizes under stringent conditions to a base sequence complementary to any one base sequence selected from the group consisting of SEQ ID NOs: 1611 to 1654, 1664 to 1707, 1718 to 1761, 1773 to 1816, 1829 to 1872, 1886 to 1929, 1944 to 1987, 2003 to 2046, 2063 to 2106, 2124 to 2167, 2186 to 2229, 2249 to 2292, 2313 to 2356, 2378 to 2421, 2444 to 2487, and 2511 to 2554;
[0109] (c) a base sequence that has at least 85% identity with any one base sequence selected from the group consisting of SEQ ID NOs: 1611 to 1654, 1664 to 1707, 1718 to 1761, 1773 to 1816, 1829 to 1872, 1886 to 1929, 1944 to 1987, 2003 to 2046, 2063 to 2106, 2124 to 2167, 2186 to 2229, 2249 to 2292, 2313 to 2356, 2378 to 2421, 2444 to 2487, and 2511 to 2554, and has a length within #15% of the length of the any one base sequence selected; or
[0110] (d) a partial base sequence of any one base sequence selected from the group consisting of the base sequences (a), (b), and (c).
   (15-2)

[0111] The combination according to (14), wherein the third antisense oligomer comprises a base sequence complementary to:
[0112] (a) any one base sequence selected from the group consisting of SEQ ID NOs: 1614 to 1654, 1667 to 1707, 1721 to 1761, 1776 to 1816, 1832 to 1872, 1889 to 1929, 1947 to 1987, 2006 to 2046, 2066 to 2106, 2127 to 2167, 2189 to 2229, 2252 to 2292, 2316 to 2356, 2381 to 2421, 2447 to 2487, and 2514 to 2554;
[0113] (b) a base sequence that hybridizes under stringent conditions to a base sequence complementary to any one base sequence selected from the group consisting of SEQ ID NOs: 1614 to 1654, 1667 to 1707, 1721 to 1761, 1776 to 1816, 1832 to 1872, 1889 to 1929, 1947 to 1987, 2006 to 2046, 2066 to 2106, 2127 to 2167, 2189 to 2229, 2252 to 2292, 2316 to 2356, 2381 to 2421, 2447 to 2487, and 2514 to 2554;
[0114] (c) a base sequence that has at least 85% identity with any one base sequence selected from the group consisting of SEQ ID NOs: 1614 to 1654, 1667 to 1707, 1721 to 1761, 1776 to 1816, 1832 to 1872, 1889 to 1929, 1947 to 1987, 2006 to 2046, 2066 to 2106, 2127 to 2167, 2189 to 2229, 2252 to 2292, 2316 to 2356, 2381 to 2421, 2447 to 2487, and 2514 to 2554, and has a length within +15% of the length of the any one base sequence selected; or
[0115] (d) a partial base sequence of any one base sequence selected from the group consisting of the base sequences (a), (b), and (c).
   (16)

[0116] The combination according to (14), wherein the third antisense oligomer comprises a base sequence complementary to:
[0117] (a) any one base sequence selected from the group consisting of SEQ ID NOs: 1617 to 1654, 1670 to 1707, 1724 to 1761, 1779 to 1816, 1835 to 1872, 1892 to 1929, 1950 to 1987, 2009 to 2046, 2069 to 2106, 2130 to 2167, 2192 to 2229, 2255 to 2292, 2319 to 2356, 2384 to 2421, 2450 to 2487, and 2517 to 2554;
[0118] (b) a base sequence that hybridizes under stringent conditions to a base sequence complementary to any one base sequence selected from the group consisting of SEQ ID NOs: 1617 to 1654, 1670 to 1707, 1724 to 1761, 1779 to 1816, 1835 to 1872, 1892 to 1929, 1950 to 1987, 2009 to 2046, 2069 to 2106, 2130 to 2167, 2192 to 2229, 2255 to 2292, 2319 to 2356, 2384 to 2421, 2450 to 2487, and 2517 to 2554;
[0119] (c) a base sequence that has at least 85% identity with any one base sequence selected from the group consisting of SEQ ID NOS: 1617 to 1654, 1670 to 1707, 1724 to 1761, 1779 to 1816, 1835 to 1872, 1892 to 1929, 1950 to 1987, 2009 to 2046, 2069 to 2106, 2130 to 2167, 2192 to 2229, 2255 to 2292, 2319 to 2356, 2384 to 2421, 2450 to 2487, and 2517 to 2554, and has a length within +15% of the length of the any one base sequence selected; or
[0120] (d) a partial base sequence of any one base sequence selected from the group consisting of the base sequences (a), (b), and (c).
   (17-1)

[0121] The combination according to any one of (1) to (14), wherein the third antisense oligomer comprises a base sequence selected from the group consisting of SEQ ID NOs: 3060, 3065, 3077, 3082, 3087, 3090, 3096, 3108, 3119, and 3320.

(17-2)

[0122] The combination according to any one of (1) to (14), wherein the third antisense oligomer comprises a base sequence selected from the group consisting of SEQ ID NOs: 3077, 3082, 3087, 3090, 3096, 3108, and 3119.

(17-3)

[0123] The combination according to any one of (1) to (14), wherein the third antisense oligomer comprises a base sequence selected from the group consisting of SEQ ID NOs: 3082, 3087, 3090, 3096, 3108, and 3119.

(18)

[0124] The combination according to any one of (12) to (17), wherein the first antisense oligomer comprises the first unit oligomer and the second unit oligomer from the 5′ ends in this order, the first unit oligomer comprises any one base sequence selected from SEQ ID NOs: 907 to 1602, the second unit oligomer comprises any one base sequence selected from SEQ ID NOS: 106 to 210, the second antisense oligomer comprises any one base sequence selected from SEQ ID NOs: 4299 to 5090, and the third antisense oligomer comprises any one base sequence selected from SEQ ID NOs: 2555 to 3506.

(19)

[0125] The combination according to any one of (1) to (18), wherein
[0126] the first antisense oligomer comprises the first unit oligomer and the second unit oligomer from the 5′ ends in this order, and
[0127] the first unit oligomer comprises a base sequence of SEQ ID NO: 1201, the second unit oligomer comprises a base sequence of SEQ ID NO: 151, the second antisense oligomer comprises a base sequence of SEQ ID NO: 4950, and the third antisense oligomer comprises a base sequence of SEQ ID NO: 3082,
[0128] the first unit oligomer comprises a base sequence of SEQ ID NO: 1201, the second unit oligomer comprises a base sequence of SEQ ID NO: 201, the second antisense oligomer comprises a base sequence of SEQ ID NO: 4950, and the third antisense oligomer comprises a base sequence of SEQ ID NO: 3082,
[0129] the first unit oligomer comprises a base sequence of SEQ ID NO: 1201, the second unit oligomer comprises a base sequence of SEQ ID NO: 203, the second antisense oligomer comprises a base sequence of SEQ ID NO: 4950, and the third antisense oligomer comprises a base sequence of SEQ ID NO: 3082,
[0130] the first unit oligomer comprises a base sequence of SEQ ID NO: 1201, the second unit oligomer comprises a base sequence of SEQ ID NO: 205, the second antisense oligomer comprises a base sequence of SEQ ID NO: 4950, and the third antisense oligomer comprises a base sequence of SEQ ID NO: 3082,
[0131] the first unit oligomer comprises a base sequence of SEQ ID NO: 1239, the second unit oligomer comprises a base sequence of SEQ ID NO: 114, the second antisense oligomer comprises a base sequence of SEQ ID NO: 4950, and the third antisense oligomer comprises a base sequence of SEQ ID NO: 3082,
[0132] the first unit oligomer comprises a base sequence of SEQ ID NO: 1224, the second unit oligomer comprises a base sequence of SEQ ID NO: 124, the second antisense oligomer comprises a base sequence of SEQ ID NO: 4950, and the third antisense oligomer comprises a base sequence of SEQ ID NO: 3082,
[0133] the first unit oligomer comprises a base sequence of SEQ ID NO: 1180, the second unit oligomer comprises a base sequence of SEQ ID NO: 151, the second antisense oligomer comprises a base sequence of SEQ ID NO: 4950, and the third antisense oligomer comprises a base sequence of SEQ ID NO: 3082,
[0134] the first unit oligomer comprises a base sequence of SEQ ID NO: 1190, the second unit oligomer comprises a base sequence of SEQ ID NO: 151, the second antisense oligomer comprises a base sequence of SEQ ID NO: 4950, and the third antisense oligomer comprises a base sequence of SEQ ID NO: 3082,
[0135] the first unit oligomer comprises a base sequence of SEQ ID NO: 1212, the second unit oligomer comprises a base sequence of SEQ ID NO: 151, the second antisense oligomer comprises a base sequence of SEQ ID NO: 4950, and the third antisense oligomer comprises a base sequence of SEQ ID NO: 3082,
[0136] the first unit oligomer comprises a base sequence of SEQ ID NO: 1222, the second unit oligomer comprises a base sequence of SEQ ID NO: 151, the second antisense oligomer comprises a base sequence of SEQ ID NO: 4950, and the third antisense oligomer comprises a base sequence of SEQ ID NO: 3082,
[0137] the first unit oligomer comprises a base sequence of SEQ ID NO: 1201, the second unit oligomer comprises a base sequence of SEQ ID NO: 151, the second antisense oligomer comprises a base sequence of SEQ ID NO: 4950, and the third antisense oligomer comprises a base sequence of SEQ ID NO: 3060,
[0138] the first unit oligomer comprises a base sequence of SEQ ID NO: 1201, the second unit oligomer comprises a base sequence of SEQ ID NO: 151, the second antisense oligomer comprises a base sequence of SEQ ID NO: 4950, and the third antisense oligomer comprises a base sequence of SEQ ID NO: 3065,
[0139] the first unit oligomer comprises a base sequence of SEQ ID NO: 1201, the second unit oligomer comprises a base sequence of SEQ ID NO: 151, the second antisense oligomer comprises a base sequence of SEQ ID NO: 4950, and the third antisense oligomer comprises a base sequence of SEQ ID NO: 3077,
[0140] the first unit oligomer comprises a base sequence of SEQ ID NO: 1201, the second unit oligomer comprises a base sequence of SEQ ID NO: 151, the second antisense oligomer comprises a base sequence of SEQ ID NO: 4950, and the third antisense oligomer comprises a base sequence of SEQ ID NO: 3087,
[0141] the first unit oligomer comprises a base sequence of SEQ ID NO: 1201, the second unit oligomer comprises a base sequence of SEQ ID NO: 151, the second antisense oligomer comprises a base sequence of SEQ ID NO: 4950, and the third antisense oligomer comprises a base sequence of SEQ ID NO: 3090,
[0142] the first unit oligomer comprises a base sequence of SEQ ID NO: 1201, the second unit oligomer comprises a base sequence of SEQ ID NO: 151, the second antisense oligomer comprises a base sequence of SEQ ID NO: 4950, and the third antisense oligomer comprises a base sequence of SEQ ID NO: 3096,
[0143] the first unit oligomer comprises a base sequence of SEQ ID NO: 1201, the second unit oligomer comprises a base sequence of SEQ ID NO: 151, the second antisense oligomer comprises a base sequence of SEQ ID NO: 4950, and the third antisense oligomer comprises a base sequence of SEQ ID NO: 3108,
[0144] the first unit oligomer comprises a base sequence of SEQ ID NO: 1201, the second unit oligomer comprises a base sequence of SEQ ID NO: 151, the second antisense oligomer comprises a base sequence of SEQ ID NO: 4950, and the third antisense oligomer comprises a base sequence of SEQ ID NO: 3119,
[0145] the first unit oligomer comprises a base sequence of SEQ ID NO: 1201, the second unit oligomer comprises a base sequence of SEQ ID NO: 151, the second antisense oligomer comprises a base sequence of SEQ ID NO: 4950, and the third antisense oligomer comprises a base sequence of SEQ ID NO: 3320,
[0146] the first unit oligomer comprises a base sequence of SEQ ID NO: 1201, the second unit oligomer comprises a base sequence of SEQ ID NO: 151, the second antisense oligomer comprises a base sequence of SEQ ID NO: 4698, and the third antisense oligomer comprises a base sequence of SEQ ID NO: 3082,
[0147] the first unit oligomer comprises a base sequence of SEQ ID NO: 1201, the second unit oligomer comprises a base sequence of SEQ ID NO: 151, the second antisense oligomer comprises a base sequence of SEQ ID NO: 4702, and the third antisense oligomer comprises a base sequence of SEQ ID NO: 3082,
[0148] the first unit oligomer comprises a base sequence of SEQ ID NO: 1201, the second unit oligomer comprises a base sequence of SEQ ID NO: 151, the second antisense oligomer comprises a base sequence of SEQ ID NO: 4752, and the third antisense oligomer comprises a base sequence of SEQ ID NO: 3082,
[0149] the first unit oligomer comprises a base sequence of SEQ ID NO: 1201, the second unit oligomer comprises a base sequence of SEQ ID NO: 151, the second antisense oligomer comprises a base sequence of SEQ ID NO: 4923, and the third antisense oligomer comprises a base sequence of SEQ ID NO: 3082,
[0150] the first unit oligomer comprises a base sequence of SEQ ID NO: 1201, the second unit oligomer comprises a base sequence of SEQ ID NO: 151, the second antisense oligomer comprises a base sequence of SEQ ID NO: 4926, and the third antisense oligomer comprises a base sequence of SEQ ID NO: 3082,
[0151] the first unit oligomer comprises a base sequence of SEQ ID NO: 1201, the second unit oligomer comprises a base sequence of SEQ ID NO: 151, the second antisense oligomer comprises a base sequence of SEQ ID NO: 4936, and the third antisense oligomer comprises a base sequence of SEQ ID NO: 3082,
[0152] the first unit oligomer comprises a base sequence of SEQ ID NO: 1201, the second unit oligomer comprises a base sequence of SEQ ID NO: 151, the second antisense oligomer comprises a base sequence of SEQ ID NO: 4977, and the third antisense oligomer comprises a base sequence of SEQ ID NO: 3082,
[0153] the first unit oligomer comprises a base sequence of SEQ ID NO: 1201, the second unit oligomer comprises a base sequence of SEQ ID NO: 151, the second antisense oligomer comprises a base sequence of SEQ ID NO: 4977, and the third antisense oligomer comprises a base sequence of SEQ ID NO: 3096, or
[0154] the first unit oligomer comprises a base sequence of SEQ ID NO: 1180, the second unit oligomer comprises a base sequence of SEQ ID NO: 151, the second antisense oligomer comprises a base sequence of SEQ ID NO: 4977, and the third antisense oligomer comprises a base sequence of SEQ ID NO: 3096.
   (20)

[0155] The combination according to (18) or (19), wherein the first unit oligomer comprises a base sequence of SEQ ID NO: 1201, the second unit oligomer comprises a base sequence of SEQ ID NO: 151, the second antisense oligomer comprises a base sequence of SEQ ID NO: 4950 or 4880, and the third antisense oligomer comprises a base sequence of SEQ ID NO: 3082, 3090, or 3096.

(21)

[0156] The combination according to any one of (1) to (20), the combination causing skipping of all exons from the 45th exon to the 55th exon in the human dystrophin pre-mRNA.

(22)

[0157] The combination according to any one of (1) to (11), wherein the first and second antisense oligomers are oligonucleotides, or the combination according to any one of (12) to (21), wherein the first to third antisense oligomers are oligonucleotides.

(23)

[0158] The combination according to (22), wherein a sugar moiety and/or a phosphate-binding region of at least one nucleotide constituting the oligonucleotide is modified.

(24)

[0159] The combination according to (22) or (23), wherein the sugar moiety of at least one nucleotide constituting the oligonucleotide is a ribose in which the 2′-OH group is replaced by any one group selected from the group consisting of —OR, —R, —R′OR, —SH, —SR, —NH₂, —NHR, —NR₂, —N₃, —CN, —F, —Cl, —Br, and —I (wherein R is an alkyl or an aryl and R′ is an alkylene).

(25)

[0160] The combination according to any one of (22) to (24), wherein the phosphate-binding region of at least one nucleotide constituting the oligonucleotide is any one selected from the group consisting of a phosphorothioate bond, a phosphorodithioate bond, an alkylphosphonate bond, a phosphoramidate bond and a boranophosphate bond.

(26)

[0161] The combination according to any one of (1) to (11), wherein the first and second antisense oligomers are morpholino oligomers, or the combination according to any one of (12) to (21), wherein the first to third antisense oligomers are oligonucleotides.

(27)

[0162] The combination according to (26), wherein the first to third antisense oligomers are phosphorodiamidate morpholino oligomers.

(28)

[0163] The combination according to (26) or (27), wherein the 5′ end of each of the first to third antisense oligomers is a group represented by any one of the following chemical formulae (1) to (3):

[chemical structure]

[0164] (a) A pharmaceutical composition comprising the first and second antisense oligomers according to any one of (1) to (28), or pharmaceutically acceptable salts thereof, or hydrates thereof, or
[0165] (b) a pharmaceutical combination comprising (i) a pharmaceutical composition comprising the first antisense oligomer according to any one of (1) to (28), or a pharmaceutically acceptable salt thereof, or a hydrate thereof, and (ii) a pharmaceutical composition comprising the second antisense oligomer according to any one of (1) to (28), or a pharmaceutically acceptable salt thereof, or a hydrate thereof.
   (30)
[0166] (a) A pharmaceutical composition comprising the first to third antisense oligomers according to any one of (12) to (28), or pharmaceutically acceptable salts thereof, or hydrates thereof, or
[0167] (b) a pharmaceutical combination comprising (i) a pharmaceutical composition comprising the first antisense oligomer according to any one of (12) to (28), or a pharmaceutically acceptable salt thereof, or a hydrate thereof, (ii) a pharmaceutical composition comprising the second antisense oligomer according to any one of (12) to (28), or a pharmaceutically acceptable salt thereof, or a hydrate thereof, and (iii) a pharmaceutical composition comprising the third antisense oligomer according to any one of (12) to (28), or a pharmaceutically acceptable salt thereof, or a hydrate thereof.
   (31)

[0168] The pharmaceutical composition or the pharmaceutical combination according to (29) or (30), wherein the pharmaceutical composition further comprises a pharmaceutically acceptable carrier.

(32)

[0169] The pharmaceutical composition or the pharmaceutical combination according to any one of (29) to (31), for treatment of muscular dystrophy.

(33)

[0170] The pharmaceutical composition or the pharmaceutical combination according to any one of (29) to (32), for being administered to a human patient.

(34)

[0171] A method for treatment of muscular dystrophy, comprising administering to a patient with muscular dystrophy (i) the first and second antisense oligomers according to any one of (1) to (28), or pharmaceutically acceptable salts thereof, or hydrates thereof, (ii) the first to third antisense oligomers according to any one of (12) to (28), or pharmaceutically acceptable salts thereof, or hydrates thereof, or (iii) the pharmaceutical composition or the pharmaceutical combination according to any one of (29) to (33).

(35)

[0172] The method for treatment according to (34), wherein the muscular dystrophy patient is a patient with a mutation that is a target of exon 45 to 55 skipping in dystrophin gene.

(36)

[0173] The method for treatment according to (34) or (35), wherein the patient is a human.

[0174] The present invention provides a combination of antisense oligomers that cause simultaneous skipping of a plurality of exons in a target. Another aspect of the present invention provides a pharmaceutical composition or combination for treating muscular dystrophy patients having various mutations by causing simultaneous skipping of a plurality of exons in objective pre-mRNA. An alternative aspect of the present invention enables simultaneous skipping of exons 45 to 55 in human dystrophin pre-mRNA to be caused with a high efficiency.

### BRIEF DESCRIPTION OF DRAWINGS

[0175] FIG. 1 is a diagram showing results of studying exon 45 to 55 skipping in mouse dystrophin pre-mRNA in H2K-mdx52 cells by RT-PCR (total concentration of added PMO: 30 μM).

[0176] FIG. 2 is a diagram showing results of studying exon 45 skipping in mouse dystrophin pre-mRNA in H2K-mdx52 cells by RT-PCR (total concentration of added PMO: 30 μM).

[0177] FIG. 3 is a diagram showing results of studying exon 45 to 55 skipping in mouse dystrophin pre-mRNA in H2K-mdx52 cells by RT-PCR. In the drawing, “2-2” indicates a result obtained by treatment with Mixture 2+PMO No. 3 (1:1), “2-4” indicates a result obtained by treatment with Mixture 2+PMO No. 3 (1:2), “2-5” indicates a result obtained by treatment with PMO No. 3 singly, “2-7” indicates a result obtained by treatment with Mixture 2 singly, and “NT” means “not treated” (total concentration of added PMO: 15 μM).

[0178] FIG. 4 is a diagram showing results of studying exon 45 skipping in mouse dystrophin pre-mRNA in H2K-mdx52 cells by RT-PCR. In the drawing, “2-2” indicates a result obtained by treatment with Mixture 2+PMO No. 3 (1:1), “2-4” indicates a result obtained by treatment with Mixture 2+PMO No. 3 (1:2), “2-5” indicates a result obtained by treatment with PMO No. 3 singly, “2-7” indicates a result obtained by treatment with Mixture 2 singly, and NT means “not treated” (total concentration of added PMO: 15 μM).

[0179] FIG. 5 is a diagram showing results of studying exon 45 to 55 skipping in mouse dystrophin pre-mRNA in H2K-mdx52 cells by RT-PCR. In the drawing, “3-2” indicates a result obtained by treatment with Mixture 2+PMO No. 4 (1:1), “3-4” indicates a result obtained by treatment with Mixture 2+PMO No. 4 (1:2), “3-5” indicates a result obtained by treatment with PMO No. 4 singly, “3-7” indicates a result obtained by treatment with Mixture 2 singly, and “NT” means “not treated” (total concentration of added PMO: 15 μM).

[0180] FIG. 6 is a diagram showing results of studying exon 45 skipping in mouse dystrophin pre-mRNA in H2K-mdx52 cells by RT-PCR. In the drawing, “3-2” indicates a result obtained by treatment with Mixture 2+PMO No. 4 (1:1), “3-4” indicates a result obtained by treatment with Mixture 2+PMO No. 4 (1:2), “3-5” indicates a result obtained by treatment with PMO No. 4 singly, “3-7” indicates a result obtained by treatment with Mixture 2 singly, and NT means “not treated” (total concentration of added PMO: 15 μM).

[0181] FIG. 7 is a diagram showing results of studying exon 45 to 55 skipping in mouse dystrophin pre-mRNA in H2K-mdx52 cells by RT-PCR. In the drawing, “2-1” indicates a result obtained by treatment with Mixture 2 singly, “2-2” indicates a result obtained by treatment with Mixture 2+PMO No. 3 (1:1), “2-3” indicates a result obtained by treatment with Mixture 2+PMO No. 3 (2:1), “2-4” indicates a result obtained by treatment with Mixture 2+PMO No. 3 (3:1), and “NT” means “not treated” (total concentration of added PMO: 15 μM).

[0182] FIG. 8 is a diagram showing results of studying exon 45 skipping in mouse dystrophin pre-mRNA in H2K-mdx52 cells by RT-PCR. In the drawing, “2-1” indicates a result obtained by treatment with Mixture 2 singly, “2-2” indicates a result obtained by treatment with Mixture 2+PMO No. 3 (1:1), “2-3” indicates a result obtained by treatment with Mixture 2+PMO No. 3 (2:1), “2-4” indicates a result obtained by treatment with Mixture 2+PMO No. 3 (3:1), and “NT” means “not treated” (total concentration of added PMO: 15 μM).

[0183] FIG. 9 is a diagram showing results of studying exon 45 to 55 skipping in mouse dystrophin pre-mRNA in H2K-mdx52 cells by RT-PCR. In the drawing, “NC” indicates a result obtained by treatment with Endo-porter singly, “Mix 2” indicates a result obtained by treatment with a mixture of PMO No. 1 and PMO No. 2 both in a final concentration of 25 μM, and “Mix 2+hnRNP A1” indicates a result obtained by treatment with a mixture of PMO No. 1 and PMO No. 2 both in a final concentration of 18.75 μM, and PMO No. 3 in a final concentration of 12.5 μM (total concentration of added PMO: 50 μM).

[0184] FIG. 10 is a diagram showing results of studying exon 45 skipping in mouse dystrophin pre-mRNA in H2K-mdx52 cells by RT-PCR. In the drawing, “NC” indicates a result obtained by treatment with Endo-porter singly, “Mix 2” indicates a result obtained by treatment with a mixture of PMO No. 1 and PMO No. 2 both in a final concentration of 25 μM, and “Mix 2+hnRNP A1” indicates a result obtained by treatment with a mixture of PMO No. 1 and PMO No. 2 both in a final concentration of 18.75 μM, and PMO No. 3 in a final concentration of 12.5 μM (total concentration of added PMO: 50 μM).

[0185] FIG. 11 is a diagram showing results of studying, by Western blotting, expression of dystrophin protein by exon 45 to 55 skipping in mouse dystrophin pre-mRNA in H2K-mdx52 cells. In the drawing, “NC” indicates a result obtained by treatment with Endo-porter singly, “Mix 2” indicates a result obtained by treatment with a mixture of PMO No. 1 and PMO No. 2 both in a final concentration of 25 μM, “Mix 2+hnRNP A1” indicates a result obtained by treatment with a mixture of PMO No. 1 and PMO No. 2 both in a final concentration of 18.75 μM, and PMO No. 3 in a final concentration of 12.5 μM, and “NT” means “not treated” (total concentration of added PMO: 50 μM).

[0186] FIG. 12 is a diagram showing results of studying exon 45 to 55 multi-exon skipping in normal human-derived myoblasts by RT-PCR.

[0187] FIG. 13 is a diagram showing results of studying exon 45 skipping in normal human-derived myoblasts by RT-PCR.

[0188] FIG. 14 is a diagram showing results of studying exon 45 to 55 multi-exon skipping in DMD patient-derived myoblasts with exon 48 to 50 deletion by RT-PCR.

[0189] FIG. 15 is a diagram showing results of studying exon 45 skipping in DMD patient-derived myoblasts with exon 48 to 50 deletion by RT-PCR.

[0190] FIG. 16 is a diagram showing results of studying exon 45 to 55 multi-exon skipping in DMD patient-derived myoblasts with exon 48 to 50 deletion by RT-PCR.

[0191] FIG. 17 is a diagram showing results of studying exon 45 skipping in DMD patient-derived myoblasts with exon 48 to 50 deletion by RT-PCR.

[0192] FIG. 18 is a diagram showing results of studying exon 45 to 55 multi-exon skipping in DMD patient-derived myoblasts with exon 48 to 50 deletion by Western blotting.

[0193] FIG. 19 is a diagram showing results of studying exon 45 to 55 multi-exon skipping in DMD patient-derived myoblasts with exon 46 to 51 deletion by RT-PCR.

[0194] FIG. 20 is a diagram showing results of studying exon 45 skipping in DMD patient-derived myoblasts with exon 46 to 51 deletion by RT-PCR.

[0195] FIG. 21 is a diagram showing results of studying exon 45 to 55 multi-exon skipping in DMD patient-derived myoblasts with exon 46 to 51 deletion by RT-PCR.

[0196] FIG. 22 is a diagram showing results of studying exon 45 skipping in DMD patient-derived myoblasts with exon 46 to 51 deletion by RT-PCR.

[0197] FIG. 23 is a diagram showing results of studying exon 45 to 55 multi-exon skipping in DMD patient-derived myoblasts with exon 46 to 51 deletion by Western blotting.

[0198] FIG. 24 is a diagram showing results of studying exon 45 to 55 multi-exon skipping in DMD patient-derived myoblasts with exon 51 deletion by RT-PCR.

[0199] FIG. 25 is a diagram showing results of studying exon 45 skipping in DMD patient-derived myoblasts with exon 51 deletion by RT-PCR.

[0200] FIG. 26 is a diagram showing results of studying exon 45 to 55 multi-exon skipping in DMD patient-derived myoblasts with exon 51 deletion by RT-PCR.

[0201] FIG. 27 is a diagram showing results of studying exon 45 skipping in DMD patient-derived myoblasts with exon 51 deletion by RT-PCR.

[0202] FIG. 28 is a diagram showing results of studying exon 45 to 55 multi-exon skipping in DMD patient-derived myoblasts with exon 51 deletion by RT-PCR.

[0203] FIG. 29 is a diagram showing results of studying exon 45 skipping in DMD patient-derived myoblasts with exon 51 deletion by RT-PCR.

[0204] FIG. 30 is a diagram showing results of studying exon 45 to 55 multi-exon skipping in DMD patient-derived myoblasts with exon 51 deletion by RT-PCR.

[0205] FIG. 31 is a diagram showing results of studying exon 45 skipping in DMD patient-derived myoblasts with exon 51 deletion by RT-PCR.

[0206] FIG. 32 is a diagram showing results of studying exon 45 to 55 multi-exon skipping in DMD patient-derived myoblasts with exon 51 deletion by RT-PCR.

[0207] FIG. 33 is a diagram showing results of studying exon 45 skipping in DMD patient-derived myoblasts with exon 51 deletion by RT-PCR.

[0208] FIG. 34 is a diagram showing results of studying exon 45 to 55 multi-exon skipping in DMD patient-derived myoblasts with exon 51 deletion by RT-PCR.

[0209] FIG. 35 is a diagram showing results of studying exon 45 skipping in DMD patient-derived myoblasts with exon 51 deletion by RT-PCR.

[0210] FIG. 36 is a diagram showing results of studying exon 45 to 55 multi-exon skipping in DMD patient-derived myoblasts with exon 51 deletion by RT-PCR.

[0211] FIG. 37 is a diagram showing results of studying exon 45 skipping in DMD patient-derived myoblasts with exon 51 deletion by RT-PCR.

[0212] FIG. 38 is a diagram showing results of studying exon 45 to 55 multi-exon skipping in DMD patient-derived myoblasts with exon 51 deletion by Western blotting.

[0213] FIG. 39 is a diagram showing results of studying exon 45 to 55 multi-exon skipping in DMD patient-derived myoblasts with exon 51 deletion by Western blotting.

### DESCRIPTION OF EMBODIMENTS

[0214] Hereinafter, the present invention is described in detail. The embodiments described below are intended to be presented by way of example merely to describe the invention but not to limit the invention only to the following embodiments. The present invention may be implemented in various ways without departing from the gist of the invention.

### 1. Combination of Antisense Oligomers

[0215] The present invention provides a combination of antisense oligomers or pharmaceutically acceptable salts thereof, or hydrates thereof which cause simultaneous skipping of two or more numerically consecutive exons selected from the group consisting of the 45th exon to the 55th exon in human dystrophin pre-mRNA, the combination comprising:
[0216] (i) a first antisense oligomer or a pharmaceutically acceptable salt thereof, or a hydrate thereof, comprising:
   [0217] a first unit oligomer comprising a base sequence complementary to a base sequence consisting of a base sequence of 11 bases in the upstream direction from the 3′ end of the 44th intron and a base sequence of 69 bases in the downstream direction from the 5′ end of the 45th exon in the human dystrophin pre-mRNA, or a partial base sequence thereof; and
   [0218] a second unit oligomer comprising a base sequence complementary to a base sequence of from the 52nd to 75th bases in the upstream direction from the 3′ end of the 44th intron in the human dystrophin pre-mRNA, or a partial base sequence thereof; and
[0219] (ii) a second antisense oligomer or a pharmaceutically acceptable salt thereof, or a hydrate thereof, comprising a base sequence complementary to a base sequence consisting of a base sequence of 33 bases in the upstream direction from the 3′ end of the 54th intron and a base sequence of 53 bases in the downstream direction from the 5′ end of the 55th exon in the human dystrophin pre-mRNA, or a partial base sequence thereof. The foregoing combination is hereinafter referred to also as the “combination of the present invention”.

[0220] As used herein, the term “combination” means a substance combination, a pharmaceutical combination, an agent combination, and the like. In one embodiment, respective antisense oligomers in the combination of the present invention are comprised in one pharmaceutical composition, and simultaneously administered. In another embodiment, respective antisense oligomers in the combination of the present invention are comprised in a plurality of pharmaceutical compositions, and separately (simultaneously or sequentially) administered. As used herein, the term “simultaneously” administering a plurality of pharmaceutical compositions means that a plurality of pharmaceutical compositions are administered at the same time. As used herein, the term “sequentially” administering a plurality of pharmaceutical compositions means that these are administered at different times. Specifically, one pharmaceutical composition may be administered before or after another pharmaceutical composition, and an administration interval in this case is not limited, but may be, for example, a few minutes, a few hours, or a few days.

[0221] Hereinafter, a first antisense oligomer or a pharmaceutically acceptable salt thereof, or a hydrate thereof, and a second antisense oligomer or a pharmaceutically acceptable salt thereof, or a hydrate thereof (and optionally a third antisense oligomer or a pharmaceutically acceptable salt thereof, or a hydrate thereof described herein) may be collectively referred to as the “antisense oligomer of the present invention”. The antisense oligomer of the present invention may refer to each of antisense oligomers or pharmaceutically acceptable salts thereof, or hydrates thereof. A first antisense oligomer or a pharmaceutically acceptable salt thereof, or a hydrate thereof described above as (i) may be referred to as the “first antisense oligomer of the present invention”, and a second antisense oligomer or a pharmaceutically acceptable salt thereof, or a hydrate thereof described above as (ii) may be referred to as the “second antisense oligomer of the present invention”.

[0222] As used herein, the term “gene” is intended to mean a genomic gene and also include cDNA, pre-mRNA and mRNA. Preferably, the gene is pre-mRNA. As used herein, the term “pre-mRNA” is an RNA molecule comprising an exon and an intron transcribed from a target gene on the genome and is a mRNA precursor.

[0223] The human dystrophin pre-mRNA is an RNA molecule comprising an exon and an intron transcribed from the human dystrophin gene on the genome and is a mRNA precursor. Those skilled in the art can obtain information on the base sequence of the human dystrophin pre-mRNA by analogy from the genomic sequence of the human dystrophin gene (GenBank Accession Nos. NG_012232.1).

[0224] In the human genome, the human dystrophin gene locates at locus Xp21.2. The human dystrophin gene has a size of about 3.0 Mbp and is the largest gene among known human genes. However, the coding regions of the human dystrophin gene are only about 14 kb, distributed as 79 exons throughout the human dystrophin gene (Roberts, R G, et al., Genomics, 16: 536-538 (1993)). The pre-mRNA, which is the transcript of the human dystrophin gene, undergoes splicing to generate mature mRNA of about 14 kb. The base sequence of mature mRNA of human wild-type dystrophin gene is known (GenBank Accession Nos. NM_004006).

[0225] The first antisense oligomer of the present invention comprises the first unit oligomer and the second unit oligomer, or consists of the first unit oligomer and the second unit oligomer.

[0226] The first unit oligomer targets a base sequence of 11 bases in the upstream direction from the 3′ end of the 44th intron and a base sequence of 69 bases in the downstream direction from the 5′ end of the 45th exon in the human dystrophin pre-mRNA. As used herein, the term “targeting” means that an intended base sequence is a base sequence complementary to the base sequence of a target region or a partial base sequence of the target sequence.

[0227] A target sequence of the first unit oligomer can be indicated by the range of −11 bases to +69 bases when the boundary between the 3′ end of intron 44 and the 5′ end of exon 45 is defined as basing point 0, a base sequence region on the 5′ side (upstream) from the basing point in the dystrophin gene is indicated by “−” (minus), and a base sequence region on the 3′ side (downstream) therefrom is indicated by “+”. In this respect, the region indicated by the range of −11 bases to −1 base belongs to intron 44, and the region indicated by the range of +1 base to +69 bases belongs to exon 45.

[0228] The first unit oligomer comprises a base sequence complementary to a base sequence consisting of a base sequence of 11 bases in the upstream direction from the 3′ end of the 44th intron and a base sequence of 69 bases in the downstream direction from the 5′ end of the 45th exon in the human dystrophin pre-mRNA, or a partial base sequence thereof.

[0229] The second unit oligomer targets a base sequence of from the 52nd to 75th bases in the upstream direction from the 3′ end of the 44th intron in the human dystrophin pre-mRNA.

[0230] A target sequence of the second unit oligomer can be indicated by the range of −75 bases to −52 bases when the boundary between the 3′ end of intron 44 and the 5′ end of exon 45 is defined as basing point 0, a base sequence region on the 5′ side (upstream) from the basing point in the dystrophin gene is indicated by “−” (minus), and a base sequence region on the 3′ side (downstream) therefrom is indicated by “+”. In this respect, the region indicated by the range of −75 bases to −52 bases belongs to intron 44.

[0231] The second unit oligomer comprises a base sequence complementary to a base sequence of from the 52nd to 75th bases in the upstream direction from the 3′ end of the 44th intron in the human dystrophin pre-mRNA, or a partial base sequence thereof.

[0232] The second antisense oligomer of the present invention targets a base sequence consisting of a base sequence of 33 bases in the upstream direction from the 3′ end of the 54th intron and a base sequence of 53 bases in the downstream direction from the 5′ end of the 55th exon in the human dystrophin pre-mRNA.

[0233] A target sequence of the second antisense oligomer can be indicated by the range of −33 bases to +53 bases when the boundary between the 3′ end of intron 54 and the 5′ end of exon 55 is defined as basing point 0, a base sequence region on the 5′ side (upstream) from the basing point in the dystrophin gene is indicated by “−” (minus), and a base sequence region on the 3′ side (downstream) therefrom is indicated by “+”. In this respect, the region indicated by the range of −33 bases to −1 base belongs to intron 54, and the region indicated by the range of +1 base to +53 bases belongs to exon 55.

[0234] The second antisense oligomer comprises a base sequence complementary to a base sequence of 33 bases in the upstream direction from the 3′ end of the 54th intron and a base sequence of 53 bases in the downstream direction from the 5′ end of the 55th exon in the human dystrophin pre-mRNA, or a partial base sequence thereof.

[0235] The combination of the present invention may further comprise, in addition to the first antisense oligomer and the second antisense oligomer of the present invention, a third antisense oligomer or a pharmaceutically acceptable salt thereof, or a hydrate thereof, comprising a base sequence complementary to a base sequence consisting of a base sequence of 23 bases in the upstream direction from the 3′ end of the 45th exon, and a base sequence of 73 bases in the downstream direction from the 5′ end of the 45th intron in the human dystrophin pre-mRNA, or a partial base sequence thereof. Hereinafter, a third antisense oligomer or a pharmaceutically acceptable salt thereof, or a hydrate thereof is referred to also as the “third antisense oligomer of the present invention”.

[0236] The third antisense oligomer of the present invention targets a base sequence consisting of a base sequence of 23 bases in the upstream direction from the 3′ end of the 45th exon and a base sequence of 73 bases in the downstream direction from the 5′ end of the 45th intron in the human dystrophin pre-mRNA.

[0237] A target sequence of the third antisense oligomer can be indicated by the range of −23 bases to +73 bases when the boundary between the 3′ end of exon 45 and the 5′ end of intron 46 is defined as basing point 0, a base sequence region on the 5′ side (upstream) from the basing point in the dystrophin gene is indicated by “−” (minus), and a base sequence region on the 3′ side (downstream) therefrom is indicated by “+”. In this respect, the region indicated by the range of −23 bases to −1 base belongs to exon 45, and the region indicated by the range of +1 base to +73 bases belongs to intron 46.

[0238] The third antisense oligomer comprises a base sequence complementary to a base sequence consisting of a base sequence of 23 bases in the upstream direction from the 3′ end of the 45th exon and a base sequence of 73 bases in the downstream direction from the 5′ end of the 45th intron in the human dystrophin pre-mRNA, or a partial base sequence thereof.

[0239] Specific examples of surrounding sequences of the target sequences of the first unit oligomer and the second unit oligomer comprised in the first antisense oligomer, the second antisense oligomer, and the third antisense oligomer of the present invention include those shown in Table 1 below.

TABLE 1
Target surrounding sequence

| Range of −600 to +69 bases based on basing point of 3′ end of intron 44 (including | |
|---|---|
| H45_(−75)-(−52): range of −75 to −52 bases based on basing point of 3′ end of intron | |
| 44, and H45_(−11)-(69): range of -11 to +69 bases based on basing point of 3′ end of | SEQ ID |
| intron 44) | NO: |
| TCTTGATGGGATGCTCCTGAAAGCAATTAATTCTCAGTTTTTTGTGGCTTCTAATGCAAAATACATTGACGCAGACAGAATTTGAA | 5091 |
| ATGAATTTTCTTCTAATATAGCAATTAATTTTATTTAAATATCTCTAGAGTTTTTTTTTAATACTGTGACTAACCTATGTTTGTTC | |
| TTTTTCACCTCTCGTATCCACGATCACTAAGAAACCCAAATACTTTGTTCATGTTTAAATTTTACAACATTTCATAGACTATTAAA | |
| CATGGAACATCCTTGTGGGGACAAGAAATCGAATTTGCTCTTGAAAAGGTTTCCAACTAATTGATTTGTAGGACATTATAACATCC | |
| TCTAGCTGACAAGCTTACAAAAATAAAAACTGGAGCTAACCGAGAGGGTGCTTTTTTCCCTGACACATAAAAGGTGTCTTTCTGTC | |
| TTGTATCCTTTGGATATGGGCATGTCAGTTTCATAGGGAAATTTTCACATGGAGCTTTTGTATTTCTTTCTTTGCCAGTACAACTG | |
| CATGTGGTAGCACACTGTTTAATCTTTTCTCAAATAAAAAGACATGGGGCTTCATTTTTGTTTTGCCTTTTTGGTATCTTACAGGA | |
| ACTCCAGGATGGCATTGGGCAGCGGCAAACTGTTGTCAGAACATTGAATGCAACTGGGGAAGAAATA | |
| Ragne of -23 to +400 bases based on basing point of 5′ end of intron 45 (including | |
| H45_(154)-(249): range of −23 to +73 bases based on basing point of 5′ end of intron 45) | |
| CAGCTGTCAGACAGAAAAAAGAGGTAGGGCGACAGATCTAATAGGAATGAAAACATTTTAGCAGACTTTTTAAGCTTTCTTTAGAA | 5092 |
| GAATATTTCATGAGAGATTATAAGCAGGGTGAAAGGCACTAACATTAAAGAACCTATCAACCATTAATCAACAGCAGTAAAGAAAT | |
| TTTTTATTTCTTTTTTTCATATACTAAAATATATACTTGTGGCTAGTTAGTGGTTTTCTGCTATTTTAAACTTGAAGTTTGCTTTA | |
| AAAATCACCCATGATTGCTTAAAGGTGAATATCTTCAATATATTTTAACTTCAACAAGCTGAATCTCAGTTGTTTTTCAAGAAGAT | |
| TTTAGAAAGCAATTATAAATGATTGTTTTGTAGGAAAGACAGATCTTTGCTTAGTTTTAAAAATAGCTATGAATATGAC | |
| Range of −400 to +53 bases based on basing point of 3′ end of intron 54 (including | |
| H55_(−33)-(+53): range of −33 to +53 bases based on basing point of 3′ end of intron 54) | |
| TCTCAAATTTGGCAGTATATTAAAAATAAGCTTTCAAAATTGACCAACAAAAACTACAAAATTGAAAAAAAGGTACTTTGAACTTT | 5093 |
| CACATGTTCAAATATATGTATATATATTTCACATATATATATGAAACCTCCTCTGTGGAGAGGGGTTTATAGAAATCTGTAATTGT | |
| CATTCTTGCATGCCTTCCCCCATACAAACGCCTTTAAGTTAAATAAAAATGAAAGTAAATAGACTGCACAATATTATAGTTGTTGC | |
| TTAAAGGAAGAGCTGTAGCAACAACTCACCCCATTGTTGGTATATTACAATTTAGTTCCTCCATCTTTCTCTTTTTATGGAGTTCA | |
| CTAGGTGCACCATTCTGATATTTAATAATTGCATCTGAACATTTGGTCCTTTGCAGGGTGAGTGAGCGAGAGGCTGCTTTGGAAGA | |
| AACTCATAGATTACTGCAACAGT | |

[0240] Specific examples of the target sequences of the first unit oligomer and the second unit oligomer comprised in the first antisense oligomer, the second antisense oligomer, and the third antisense oligomer of the present invention include those shown in Table 2 below.

TABLE 2

| | SEQ ID |
|---|---|
| Target sequence | NO: |
| H45_(−75)-(−52) (range of −75 to −52 bases based on basing point of 3′ end of intron 44) | 5094 |
| GCACACTGTTTAATCTTTTCTCAA | |
| H45_(−11)-(+69) (range of −11 to +69 bases based on basing point of 3′ end of intron 44) | 5095 |
| GTATCTTACAGGAACTCCAGGATGGCATTGGGCAGCGGCAAACTGTTGTCAGAACATTGAATGCAACTGGGGAAGAAATA | |
| H45_(+154)-(+249) (range of −23 to +73 bases based on basing point of 5′ end of intron | 5096 |
| 45) | |
| CAGCTGTCAGACAGAAAAAAGAGGTAGGGCGACAGATCTAATAGGAATGAAAACATTTTAGCAGACTTTTTAAGCTTTCTTTAGAAGA | |
| ATATTTCA | |
| H55_(−33)-(+53) (range of −33 to +53 bases based on basing point of 3′ end of intron 54) | 5097 |
| AATAATTGCATCTGAACATTTGGTCCTTTGCAGGGTGAGTGAGCGAGAGGCTGCITTGGAAGAAACTCATAGATTACTGCAACAGT | |

[0241] As used herein, thymine “T” and uracil “U” are interchangeable with each other. Neither “T” nor “U” essentially influences the exon skipping activity of the antisense oligomer of the present invention. Therefore, as used herein, identical base sequences except for “T” or “U” are represented by the same SEQ ID NO. In the tables below, “U” may be described as “T” even in the base sequence of pre-mRNA. Those skilled in the art can understand an RNA sequence by appropriately replacing “T” with “U”.

[0242] Herein, a target base sequence is described as “Ha_b-c”.

[0243] “Ha” represents the ath exon of the human dystrophin gene, “b” represents the 5′-terminal base of the target base sequence, and “c” represents the 3′-terminal base of the target base sequence.

[0244] When “b” and “c” are positive integers, “b” and “c” each represent a base number in the downstream direction when the 5′-terminal base of the ath exon is counted as the 1st base. On the other hand, when “b” and “c” are negative integers, “b” and “c” each represent a base number in the upstream direction when the 3′-terminal base of the (a-1) th intron is counted as the 1st base.

[0245] For example, “H55_(-75)-(-52)” means a base sequence in which the 5′ end of the target base sequence is the 75th base in the upstream direction from the 3′ end of the 54th intron and the 3′ end of the target base sequence is the 52nd base in the upstream direction from the 3′ end of the 54th intron.

[0246] The surrounding sequence of the target region or the target sequence of the antisense oligomer of the present invention includes both wild (e.g., the base sequences represented by SEQ ID NOs: 5021 to 5027) and mutant types in relation to the human dystrophin pre-mRNA. Such a mutant type has, for example, any one base sequence selected from the group consisting of base sequences (B0) and (B1) to (B16) below:
[0247] (B0) a base sequence that hybridizes under stringent conditions to a base sequence complementary to any one base sequence selected from the group consisting of SEQ ID NOs: 5021 to 5027;
[0248] (B1) a base sequence that has at least 85% identity with any one base sequence selected from the group consisting of SEQ ID NOs: 5021 to 5027, and has a length within ±15% of the length of the any one base sequence selected;
[0249] (B2) a base sequence that has at least 86% identity with any one base sequence selected from the group consisting of SEQ ID NOs: 5021 to 5027, and has a length within ±14% of the length of the any one base sequence selected;
[0250] (B3) a base sequence that has at least 87% identity with any one base sequence selected from the group consisting of SEQ ID NOs: 5021 to 5027, and has a length within ±13% of the length of the any one base sequence selected;
[0251] (B4) a base sequence that has at least 88% identity with any one base sequence selected from the group consisting of SEQ ID NOS: 5021 to 5027, and has a length within ±12% of the length of the any one base sequence selected;
[0252] (B5) a base sequence that has at least 89% identity with any one base sequence selected from the group consisting of SEQ ID NOs: 5021 to 5027, and has a length within ±11% of the length of the any one base sequence selected;
[0253] (B6) a base sequence that has at least 90% identity with any one base sequence selected from the group consisting of SEQ ID NOs: 5021 to 5027, and has a length within ±10% of the length of the any one base sequence selected;
[0254] (B7) a base sequence that has at least 91% identity with any one base sequence selected from the group consisting of SEQ ID NOs: 5021 to 5027, and has a length within ±9% of the length of the any one base sequence selected;
[0255] (B8) a base sequence that has at least 92% identity with any one base sequence selected from the group consisting of SEQ ID NOs: 5021 to 5027, and has a length within ±8% of the length of the any one base sequence selected;
[0256] (B9) a base sequence that has at least 93% identity with any one base sequence selected from the group consisting of SEQ ID NOS: 5021 to 5027, and has a length within ±7% of the length of the any one base sequence selected;
[0257] (B10) a base sequence that has at least 94% identity with any one base sequence selected from the group consisting of SEQ ID NOs: 5021 to 5027, and has a length within ±6% of the length of the any one base sequence selected;
[0258] (B11) a base sequence that has at least 95% identity with any one base sequence selected from the group consisting of SEQ ID NOS: 5021 to 5027, and has a length within ±5% of the length of the any one base sequence selected;
[0259] (B12) a base sequence that has at least 96% identity with any one base sequence selected from the group consisting of SEQ ID NOs: 5021 to 5027, and has a length within ±4% of the length of the any one base sequence selected;
[0260] (B13) a base sequence that has at least 97% identity with any one base sequence selected from the group consisting of SEQ ID NOs: 5021 to 5027, and has a length within ±3% of the length of the any one base sequence selected;
[0261] (B14) a base sequence that has at least 98% identity with any one base sequence selected from the group consisting of SEQ ID NOs: 5021 to 5027, and has a length within ±2% of the length of the any one base sequence selected;
[0262] (B15) a base sequence that has at least 99% identity with any one base sequence selected from the group consisting of SEQ ID NOs: 5021 to 5027, and has a length within ±1% of the length of the any one base sequence selected; and
[0263] (B16) a base sequence that has at least 99.5% identity with any one base sequence selected from the group consisting of SEQ ID NOs: 5021 to 5027, and has a length within ±0.5% of the length of the any one base sequence selected.

[0264] As used herein, the term “base sequence that hybridizes under stringent conditions” refers to, for example, a base sequence obtained by colony hybridization, plaque hybridization, Southern hybridization or the like, using as a probe all or part of a base sequence complementary to, e.g., any one base sequence selected from the group consisting of SEQ ID NOs: 5021 to 5027. The hybridization method which may be used includes methods described in, for example, “Sambrook & Russell, Molecular Cloning: A Laboratory Manual Vol. 3, Cold Spring Harbor, Laboratory Press, 2001,” “Ausubel, Current Protocols in Molecular Biology, John Wiley & Sons, 1987-1997,” etc.

[0265] As used herein, the term “complementary base sequence” is not limited to a base sequence that forms Watson-Crick pairs with an intended base sequence, and also includes a base sequence that forms wobble base pairs therewith. Herein, the Watson-Crick pair means a base pair that forms a hydrogen bond between adenine and thymine, between adenine and uracil, or between guanine and cytosine, and the wobble base pair means a base pair that forms a hydrogen bond between guanine and uracil, between inosine and uracil, between inosine and adenine, or between inosine and cytosine. The term “complementary base sequence” does not have to have 100% complementarity with the intended base sequence and may contain, for example, 1, 2, 3, 4, or 5 noncomplementary bases based on the intended base sequence or may be a base sequence shorter by 1 base, 2 bases, 3 bases, 4 bases, or 5 bases than the intended base sequence.

[0266] As used herein, the term “stringent conditions” may be any of low stringent conditions, moderate stringent conditions or high stringent conditions. The term “low stringent condition” is, for example, 5×SSC, 5×Denhardt's solution, 0.5% SDS, 50% formamide at 32° C. The term “moderate stringent condition” is, for example, 5×SSC, 5×Denhardt's solution, 0.5% SDS, 50% formamide at 42° C., or 5×SSC, 1% SDS, 50 mM Tris-HCl (pH 7.5), 50% formamide at 42° C. The term “high stringent condition” is, for example, 5×SSC, 5×Denhardt's solution, 0.5% SDS, 50% formamide at 50° C., or 0.2×SSC, 0.1% SDS at 65° C. Under these conditions, base sequences with higher homology are expected to be obtained efficiently at higher temperatures, although multiple factors are involved in hybridization stringency including temperature, probe concentration, probe length, ionic strength, time, salt concentration and others, and those skilled in the art may approximately select these factors to achieve similar stringency.

[0267] When commercially available kits are used for hybridization, for example, an Alkphos Direct Labelling and Detection System (GE Healthcare) may be used. In this case, according to the attached protocol, after cultivation with a labeled probe overnight, the membrane can be washed with a primary wash buffer containing 0.1% (w/v) SDS at 55° C., thereby detecting hybridization. Alternatively, when the probe is labeled with digoxigenin (DIG) using a commercially available reagent (e.g., a PCR Labelling Mix (Roche Diagnostics), etc.) in producing a probe based on all or part of the complementary sequence to any one base sequence selected from the group consisting of SEQ ID NOs: 233 to 256, 341 to 369, and 385 to 389, hybridization can be detected with a DIG Nucleic Acid Detection Kit (Roche Diagnostics) or the like.

[0268] The identity between base sequences may be determined using algorithm BLAST (Basic Local Alignment Search Tool) by Karlin and Altschul (Proc. Natl. Acad. Sci. U.S. Pat. No. 872,264-2268, 1990; Proc. Natl. Acad. Sci. USA 90: 5873, 1993). Programs called BLASTN and BLASTX based on the BLAST algorithm have been developed (Altschul S F, et al: J. Mol. Biol. 215: 403, 1990). When a base sequence is sequenced using BLASTN, the parameters are, for example, score=100 and wordlength=12. When BLAST and Gapped BLAST programs are used, the default parameters for each program are employed.

[0269] The antisense oligomer of the present invention comprises a base sequence complementary to a base sequence of the target regions of the present invention, or a partial base sequence thereof. The term “partial” means a region, except for the full length, of the target regions, i.e., a partial region of the target regions. The partial region may be 10 to 60 bases long, 10 to 55 bases long, 10 to 50 bases long, 10 to 45 bases long, 10 to 40 bases long, 10 to 35 bases long, 10 to 30 bases long, 10 to 25 bases long, 15 to 60 bases long, 15 to 55 bases long, 15 to 50 bases long, 15 to 45 bases long, 15 to 40 bases long, 15 to 35 bases long, 15 to 30 bases long, 15 to 25 bases long, 16 to 60 bases long, 16 to 55 bases long, 16 to 50 bases long, 16 to 45 bases long, 16 to 40 bases long, 16 to 35 bases long, 16 to 30 bases long, 16 to 25 bases long, 17 to 60 bases long, 17 to 55 bases long, 17 to 50 bases long, 17 to 45 bases long, 17 to 40 bases long, 17 to 35 bases long, 17 to 30 bases long, 17 to 25 bases long, 18 to 60 bases long, 18 to 55 bases long, 18 to 50 bases long, 18 to 45 bases long, 18 to 40 bases long, 18 to 35 bases long, 18 to 30 bases long, 18 to 25 bases long, 19 to 60 bases long, 19 to 55 bases long, 19 to 50 bases long, 19 to 45 bases long, 19 to 40 bases long, 19 to 35 bases long, 19 to 30 bases long, 19 to 25 bases long, 20 to 60 bases long, 20 to 55 bases long, 20 to 50 bases long, 20 to 45 bases long, 20 to 40 bases long, 20 to 35 bases long, 20 to 30 bases long, 20 to 25 bases long, 15 to 30 bases long, 15 to 29 bases long, 15 to 28 bases long, 15 to 27 bases long, 15 to 26 bases long, 15 to 25 bases long, 15 to 24 bases long, 15 to 23 bases long, 15 to 22 bases long, 15 to 21 bases long, 15 to 20 bases long, 15 to 19 bases long, 15 to 18 bases long, 16 to 30 bases long, 16 to 29 bases long, 16 to 28 bases long, 16 to 27 bases long, 16 to 26 bases long, 16 to 25 bases long, 16 to 24 bases long, 16 to 23 bases long, 16 to 22 bases long, 16 to 21 bases long, 16 to 20 bases long, 16 to 19 bases long, 16 to 18 bases long, 17 to 30 bases long, 17 to 29 bases long, 17 to 28 bases long, 17 to 27 bases long, 17 to 26 bases long, 17 to 25 bases long, 17 to 24 bases long, 17 to 23 bases long, 17 to 22 bases long, 17 to 21 bases long, 17 to 20 bases long, 17 to 19 bases long, 17 to 18 bases long, 18 to 30 bases long, 18 to 29 bases long, 18 to 28 bases long, 18 to 27 bases long, 18 to 26 bases long, 18 to 25 bases long, 18 to 24 bases long, 18 to 23 bases long, 18 to 22 bases long, 18 to 21 bases long, 18 to 20 bases long, 18 to 19 bases long, 19 to 30 bases long, 19 to 29 bases long, 19 to 28 bases long, 19 to 27 bases long, 19 to 26 bases long, 19 to 25 bases long, 19 to 24 bases long, 19 to 23 bases long, 19 to 22 bases long, 19 to 21 bases long, 19 to 20 bases long, 20 to 30 bases long, 20 to 29 bases long, 20 to 28 bases long, 20 to 27 bases long, 20 to 26 bases long, 20 to 25 bases long, 20 to 24 bases long, 20 to 23 bases long, 20 to 22 bases long, 20 to 21 bases long, 5 to 25 bases long, 5 to 24 bases long, 5 to 23 bases long, 5 to 22 bases long, 5 to 21 bases long, 5 to 20 bases long, 5 to 19 bases long, 5 to 18 bases long, 5 to 17 bases long, 5 to 16 bases long, 5 to 15 bases long, 5 to 14 bases long, 5 to 13 bases long, 5 to 12 bases long, 7 to 25 bases long, 7 to 24 bases long, 7 to 23 bases long, 7 to 22 bases long, 7 to 21 bases long, 7 to 20 bases long, 7 to 19 bases long, 7 to 18 bases long, 7 to 17 bases long, 7 to 16 bases long, 7 to 15 bases long, 7 to 14 bases long, 7 to 13 bases long, 7 to 12 bases long, 9 to 25 bases long, 9 to 24 bases long, 9 to 23 bases long, 9 to 22 bases long, 9 to 21 bases long, 9 to 20 bases long, 9 to 19 bases long, 9 to 18 bases long, 9 to 17 bases long, 9 to 16 bases long, 9 to 15 bases long, 9 to 14 bases long, 9 to 13 bases long, 9 to 12 bases long, 10 to 25 bases long, 10 to 24 bases long, 10 to 23 bases long, 10 to 22 bases long, 10 to 21 bases long, 10 to 20 bases long, 10 to 19 bases long, 10 to 18 bases long, 10 to 17 bases long, 10 to 16 bases long, 10 to 15 bases long, 10 to 14 bases long, 10 to 13 bases long, 10 to 12 bases long, 60 bases long, 59 bases long, 58 bases long, 57 bases long, 56 bases long, 55 bases long, 54 bases long, 53 bases long, 52 bases long, 51 bases long, 50 bases long, 49 bases long, 48 bases long, 47 bases long, 46 bases long, 45 bases long, 44 bases long, 43 bases long, 42 bases long, 41 bases long, 40 bases long, 39 bases long, 38 bases long, 37 bases long, 36 bases long, 35 bases long, 34 bases long, 33 bases long, 32 bases long, 31 bases long, 30 bases long, 29 bases long, 28 bases long, 27 bases long, 26 bases long, 25 bases long, 24 bases long, 23 bases long, 22 bases long, 21 bases long, 20 bases long, 19 bases long, 18 bases long, 17 bases long, 16 bases long, 15 bases long, 14 bases long, 13 bases long, 12 bases long, 11 bases long, 10 bases long, 9 bases long, 8 bases long, 7 bases long, 6 bases long, or 5 bases long, but not limited thereto. These lengths may be increased or decreased by 1, 2, or 3 bases.

[0270] The antisense oligomer of the present invention has an activity to cause simultaneous skipping of any two or more numerically consecutive exons selected from the group consisting of the 45th exon to the 55th exon in human dystrophin pre-mRNA. As used herein, such skipping of two or more numerically consecutive exons from objective pre-mRNA is referred to as “multi-exon skipping” or “multi-skipping”, and this activity is referred to as “multi-exon skipping activity” or “multi-skipping activity”.

[0271] As used herein, the term “cause simultaneous skipping” of two or more numerically consecutive exons includes not only removal of the respective exons from pre-mRNA at completely the same timings but also sequential removal of the respective exons within a period from pre-mRNA to mature mRNA. Specifically, the term “cause simultaneous skipping” of two or more numerically consecutive exons refers to removal of a plurality of (two or more) numerically consecutive exons from pre-mRNA.

[0272] As used herein, the term “two or more numerically consecutive exons” means a plurality of exons that increase one by one in exon number among exons (the total number of exons is referred to as Texon) contained in objective pre-mRNA. The exon number means a number assigned to exons in order from the 5′ end to the 3′ end with an exon at the most upstream position of pre-mRNA defined as the first exon, followed by the second, the third, . . . In the case of skipping of two or more numerically consecutive exons in a certain gene, its exon numbers a₁, . . . , aⱼ can be represented by the sequence {aⱼ}. The general term aⱼ in the sequence {aⱼ} is represented by the expression below:

$${a}_{j} = m + ( j - 1 ) \qquad [ Expression 1 ]$$

[0273] wherein m is a given natural number that satisfies 1≤m≤(Texon-1), and j is a natural number that satisfies 2≤(m+j)≤Texon+1.

[0274] When the objective pre-mRNA is, for example, human dystrophin pre-mRNA, Texon is 79.

[0275] In a certain aspect, j is a given natural number selected from 1 to 11. In another aspect, j is 11, j is 10, j is 9, j is 8, j is 7, j is 6, j is 5, j is 4, j is 3, j is 2, or j is 1.

[0276] Herein, the any two or more numerically consecutive exons selected from the group consisting of the 45th exon to the 55th exon mean a plurality of exons that increase one by one in exon number among 11 exons from the 45th exon to the 55th exon contained in pre-mRNA. The exon number means a number assigned to exons in order from the 5′ end to the 3′ end with an exon at the most upstream position of pre-mRNA defined as the first exon, followed by the second, the third, . . . , and the 79th exons among 79 exons contained in human dystrophin pre-mRNA. An intron is numbered as the same number as that of an exon positioned on the 5′ side thereof. Specifically, the 45th intron is flanked by the 45th exon positioned on the 5′ side thereof and the 46th exon positioned on the 3′ side thereof. As used herein, the “nth” exon or intron means the nth exon or intron counted from the 5′ end toward the 3′ end in pre-mRNA.

[0277] Table 3 shows combinations of exons included in the any two or more numerically consecutive exons selected from the group consisting of the 45th exon to the 55th exon.

TABLE 3

| Combination | Exons included |
|---|---|
| Combination 1 | 45, 46 |
| Combination 2 | 45~47 |
| Combination 3 | 45~48 |
| Combination 4 | 45~49 |
| Combination 5 | 45~50 |
| Combination 6 | 45~51 |
| Combination 7 | 45~52 |
| Combination 8 | 45~53 |
| Combination 9 | 45~54 |
| Combination 10 | 45~55 |
| Combination 11 | 46, 47 |
| Combination 12 | 46~48 |
| Combination 13 | 46~49 |
| Combination 14 | 46~50 |
| Combination 15 | 46~51 |
| Combination 16 | 46~52 |
| Combination 17 | 46~53 |
| Combination 18 | 46~54 |
| Combination 19 | 46~55 |
| Combination 20 | 47, 48 |
| Combination 21 | 47~49 |
| Combination 22 | 47~50 |
| Combination 23 | 47~51 |
| Combination 24 | 47~52 |
| Combination 25 | 47~53 |
| Combination 26 | 47~54 |
| Combination 27 | 47~55 |
| Combination 28 | 48, 49 |
| Combination 29 | 48~50 |
| Combination 30 | 48~51 |
| Combination 31 | 48~52 |
| Combination 32 | 48~53 |
| Combination 33 | 48~54 |
| Combination 34 | 48~55 |
| Combination 35 | 49. 50 |
| Combination 36 | 49~51 |
| Combination 37 | 49~52 |
| Combination 38 | 49~53 |
| Combination 39 | 49~54 |
| Combination 40 | 49~55 |
| Combination 41 | 50, 51 |
| Combination 42 | 50~52 |
| Combination 43 | 50~53 |
| Combination 44 | 50~54 |
| Combination 45 | 50~55 |
| Combination 46 | 51~52 |
| Combination 47 | 51~53 |
| Combination 48 | 51~54 |
| Combination 49 | 51~55 |
| Combination 50 | 52~53 |
| Combination 51 | 52~54 |
| Combination 52 | 52~55 |
| Combination 53 | 53, 54 |
| Combination 54 | 53~55 |
| Combination 55 | 54, 55 |

[0278] Among the combinations of exons described in Table 3, for example, the combination 1, 2, 3, 4, 6, 8, 10, 18, 20, 21, 23, 25, 27, 28, 30, 32, 34, 36, 38, 40, 41, 43, 45, 46, 50, 52, or 55 is a skipping pattern expected to exert higher therapeutic effects on DMD. Multi-exon skipping in such a combination is expected to exert therapeutic effects on more patients with DMD. In one embodiment, the combination of the present invention causes skipping of all exons from the 45th exon to the 55th exon in human dystrophin pre-mRNA.

[0279] The any two or more numerically consecutive exons selected from the group consisting of the 45th exon to the 55th exon may include a plurality of groups of consecutive exons and may be, for example, but not limited to, (example 1) exons 45 and 46 (first exon group) and exons 48 to 53 (second exon group), or (example 2) exons 46 and 47 (first exon group), exons 49 and 50 (second exon group), and exons 52 to 54 (third exon group).

[0280] In the present invention, the term “activity to cause skipping” (i.e., multi-skipping activity) means, when human dystrophin pre-mRNA is taken as an example, an activity to produce human dystrophin mRNA having deletion of any two or more numerically consecutive exons selected from the group consisting of the 45th exon to the 55th exon in the human dystrophin pre-mRNA.

[0281] In other words, this activity means that by binding of the antisense oligomer of the present invention to a target site in human dystrophin pre-mRNA, the 5′-terminal nucleotide of an exon immediately downstream of the exons to be deleted is linked to the 3′-terminal nucleotide of an exon immediately upstream of the exons to be deleted when the pre-mRNA undergoes splicing, thus resulting in formation of mature mRNA which is free of codon frame shift (i.e., mature mRNA having deletion of the exons without frame shift).

[0282] The antisense oligomer of the present invention exhibits a multi-skipping activity under physiological conditions. The term “under physiological conditions” refers to conditions set to mimic the in vivo environment in terms of pH, salt composition and temperature. The conditions are, for example, 25 to 40° C., preferably 37° C., pH 5 to 8, preferably pH 7.4 and 150 mM of sodium chloride concentration.

[0283] Whether multi-skipping is caused or not can be confirmed by introducing the combination of the present invention into a dystrophin expression cell (e.g., human rhabdomyosarcoma cells), amplifying the region surrounding exons 45 to 55 of mRNA of the human dystrophin gene from the total RNA of the dystrophin expression cell by RT-PCR, and performing nested PCR or sequence analysis on the PCR amplified product. The multi-skipping efficiency can be determined as follows. The mRNA for the human dystrophin gene is collected from test cells; in the mRNA, the polynucleotide level “A” of the band where any two or more numerically consecutive exons among exons 45 to 55 are skipped, the polynucleotide level “B” of the band where any one exon among exons 45 to 55 is skipped, and the polynucleotide level “C” of the band where no skipping is caused are measured. Using these measurement values of “A”, “B”, and “C”, the efficiency is calculated by the following equation.

$$Skipping efficiency ( \% ) = A / ( A + B + C ) \times 100$$

[0284] For example, the multi-skipping efficiency of exons 45 to 55 can be determined by using a forward primer for exon 44 and a reverse primer for exon 56 to measure the polynucleotide level “A” of the band where exons 45 to 55 are multi-skipped, using the forward primer for exon 44 and a reverse primer for exon 46 to measure the polynucleotide level “B” of the band where exon 45 is single-skipped, and using the forward primer for exon 44 and the reverse primer for exon 46 to measure the polynucleotide level “C” of the band where no skipping is caused, followed by calculation by the equation using these measurement values of “A”, “B”, and “C”.

[0285] The number of exons to be deleted in human dystrophin mRNA by the antisense oligomer of the present invention is 2, 3, 4, 5, 6, 7, 8, 9, 10, or 11. This is referred to as a deletion pattern, and various deletion patterns may exist in admixture in results obtained in one skipping experiment or skipping treatment. For example, mRNA admixture having deletion of 2, 3, 4, 5, 6, 7, 8, 9, 10, or 11 exons is obtained by introducing the antisense oligomer of the present invention to cells expressing human dystrophin pre-mRNA, and collecting its mRNA.

[0286] In a certain aspect, the term “activity to cause skipping” can be defined as (C1) to (C10) below.

[0287] (C1) Any two numerically consecutive exons selected from the group consisting of the 45th exon to the 55th exon in human dystrophin pre-mRNA are skipped with the efficiency of 5% or higher, 10% or higher, 15% or higher, 20% or higher, 25% or higher, 30% or higher, 35% or higher, 40% or higher, 45% or higher, 50% or higher, 55% or higher, 60% or higher, 65% or higher, 70% or higher, 75% or higher, 80% or higher, 85% or higher, 90% or higher, or 95% or higher.

[0288] Herein, the two numerically consecutive exons may be the 45th and the 46th exons, the 46th and the 47th exons, the 47th and the 48th exons, the 48th and the 49th exons, the 49th and the 50th exons, the 50th and the 51st exons, the 51st and the 52nd exons, the 52nd and the 53rd exons, the 53rd and the 54th exons, or the 54th and the 55th exons.

[0289] (C2) Any three numerically consecutive exons selected from the group consisting of the 45th exon to the 55th exon in human dystrophin pre-mRNA are skipped with the efficiency of 5% or higher, 10% or higher, 15% or higher, 20% or higher, 25% or higher, 30% or higher, 35% or higher, 40% or higher, 45% or higher, 50% or higher, 55% or higher, 60% or higher, 65% or higher, 70% or higher, 75% or higher, 80% or higher, 85% or higher, 90% or higher, or 95% or higher.

[0290] Herein, the three numerically consecutive exons may be the 45th to the 47th exons, the 46th to the 48th exons, the 47th to the 49th exons, the 48th to the 50th exons, the 49th to the 51st exons, the 50th to the 52nd exons, the 51st to the 53rd exons, the 52nd to the 54th exons, or the 53rd to the 55th exons.

[0291] (C3) Any four numerically consecutive exons selected from the group consisting of the 45th exon to the 55th exon in human dystrophin pre-mRNA are skipped with the efficiency of 5% or higher, 10% or higher, 15% or higher, 20% or higher, 25% or higher, 30% or higher, 35% or higher, 40% or higher, 45% or higher, 50% or higher, 55% or higher, 60% or higher, 65% or higher, 70% or higher, 75% or higher, 80% or higher, 85% or higher, 90% or higher, or 95% or higher.

[0292] Herein, the four numerically consecutive exons may be the 45th to the 48th exons, the 46th to the 49th exons, the 47th to the 50th exons, the 48th to the 51st exons, the 49th to the 52nd exons, the 50th to the 53rd exons, the 51st to the 54th exons, or the 52nd to the 55th exons.

[0293] (C4) Any five numerically consecutive exons selected from the group consisting of the 45th exon to the 55th exon in human dystrophin pre-mRNA are skipped with the efficiency of 5% or higher, 10% or higher, 15% or higher, 20% or higher, 25% or higher, 30% or higher, 35% or higher, 40% or higher, 45% or higher, 50% or higher, 55% or higher, 60% or higher, 65% or higher, 70% or higher, 75% or higher, 80% or higher, 85% or higher, 90% or higher, or 95% or higher.

[0294] Herein, the five numerically consecutive exons may be the 45th to the 49th exons, the 46th to the 50th exons, the 47th to the 51st exons, the 48th to the 52nd exons, the 49th to the 53rd exons, the 50th to the 54th exons, or the 51st to the 55th exons.

[0295] (C5) Any six numerically consecutive exons selected from the group consisting of the 45th exon to the 55th exon in human dystrophin pre-mRNA are skipped with the efficiency of 5% or higher, 10% or higher, 15% or higher, 20% or higher, 25% or higher, 30% or higher, 35% or higher, 40% or higher, 45% or higher, 50% or higher, 55% or higher, 60% or higher, 65% or higher, 70% or higher, 75% or higher, 80% or higher, 85% or higher, 90% or higher, or 95% or higher.

[0296] Herein, the six numerically consecutive exons may be the 45th to the 50th exons, the 46th to the 51st exons, the 47th to the 52nd exons, the 48th to the 53rd exons, the 49th to the 54th exons, or the 50th to the 55th exons.

[0297] (C6) Any seven numerically consecutive exons selected from the group consisting of the 45th exon to the 55th exon in human dystrophin pre-mRNA are skipped with the efficiency of 5% or higher, 10% or higher, 15% or higher, 20% or higher, 25% or higher, 30% or higher, 35% or higher, 40% or higher, 45% or higher, 50% or higher, 55% or higher, 60% or higher, 65% or higher, 70% or higher, 75% or higher, 80% or higher, 85% or higher, 90% or higher, or 95% or higher.

[0298] Herein, the seven numerically consecutive exons may be the 45th to the 51st exons, the 46th to the 52nd exons, the 47th to the 53rd exons, the 48th to the 54th exons, or the 49th to the 55th exons.

[0299] (C7) Any eight numerically consecutive exons selected from the group consisting of the 45th exon to the 55th exon in human dystrophin pre-mRNA are skipped with the efficiency of 5% or higher, 10% or higher, 15% or higher, 20% or higher, 25% or higher, 30% or higher, 35% or higher, 40% or higher, 45% or higher, 50% or higher, 55% or higher, 60% or higher, 65% or higher, 70% or higher, 75% or higher, 80% or higher, 85% or higher, 90% or higher, or 95% or higher.

[0300] Herein, the eight numerically consecutive exons may be the 45th to the 52nd exons, the 46th to the 53rd exons, the 47th to the 54th exons, or the 48th to the 55th exons.

[0301] (C8) Any nine numerically consecutive exons selected from the group consisting of the 45th exon to the 55th exon in human dystrophin pre-mRNA are skipped with the efficiency of 5% or higher, 10% or higher, 15% or higher, 20% or higher, 25% or higher, 30% or higher, 35% or higher, 40% or higher, 45% or higher, 50% or higher, 55% or higher, 60% or higher, 65% or higher, 70% or higher, 75% or higher, 80% or higher, 85% or higher, 90% or higher, or 95% or higher.

[0302] Herein, the nine numerically consecutive exons may be the 45th to the 53rd exons, the 46th to the 54th exons, or the 47th to the 55th exons.

[0303] (C9) Any ten numerically consecutive exons selected from the group consisting of the 45th exon to the 55th exon in human dystrophin pre-mRNA are skipped with the efficiency of 5% or higher, 10% or higher, 15% or higher, 20% or higher, 25% or higher, 30% or higher, 35% or higher, 40% or higher, 45% or higher, 50% or higher, 55% or higher, 60% or higher, 65% or higher, 70% or higher, 75% or higher, 80% or higher, 85% or higher, 90% or higher, or 95% or higher.

[0304] Herein, the ten numerically consecutive exons may be the 45th to the 54th exons, or the 46th to the 55th exons.

[0305] (C10) Eleven numerically consecutive exons selected from the group consisting of the 45th exon to the 55th exon in human dystrophin pre-mRNA are skipped with the efficiency of 5% or higher, 10% or higher, 15% or higher, 20% or higher, 25% or higher, 30% or higher, 35% or higher, 40% or higher, 45% or higher, 50% or higher, 55% or higher, 60% or higher, 65% or higher, 70% or higher, 75% or higher, 80% or higher, 85% or higher, 90% or higher, or 95% or higher.

[0306] Herein, the eleven numerically consecutive exons may be the 45th to the 55th exons.

[0307] The antisense oligomer of the present invention may be 10 to 60 bases long, 10 to 55 bases long, 10 to 50 bases long, 10 to 45 bases long, 10 to 40 bases long, 10 to 35 bases long, 10 to 30 bases long, 10 to 25 bases long, 15 to 60 bases long, 15 to 55 bases long, 15 to 50 bases long, 15 to 45 bases long, 15 to 40 bases long, 15 to 35 bases long, 15 to 30 bases long, 15 to 25 bases long, 16 to 60 bases long, 16 to 55 bases long, 16 to 50 bases long, 16 to 45 bases long, 16 to 40 bases long, 16 to 35 bases long, 16 to 30 bases long, 16 to 25 bases long, 17 to 60 bases long, 17 to 55 bases long, 17 to 50 bases long, 17 to 45 bases long, 17 to 40 bases long, 17 to 35 bases long, 17 to 30 bases long, 17 to 25 bases long, 18 to 60 bases long, 18 to 55 bases long, 18 to 50 bases long, 18 to 45 bases long, 18 to 40 bases long, 18 to 35 bases long, 18 to 30 bases long, 18 to 25 bases long, 19 to 60 bases long, 19 to 55 bases long, 19 to 50 bases long, 19 to 45 bases long, 19 to 40 bases long, 19 to 35 bases long, 19 to 30 bases long, 19 to 25 bases long, 20 to 60 bases long, 20 to 55 bases long, 20 to 50 bases long, 20 to 45 bases long, 20 to 40 bases long, 20 to 35 bases long, 20 to 30 bases long, 20 to 25 bases long, 15 to 30 bases long, 15 to 29 bases long, 15 to 28 bases long, 15 to 27 bases long, 15 to 26 bases long, 15 to 25 bases long, 15 to 24 bases long, 15 to 23 bases long, 15 to 22 bases long, 15 to 21 bases long, 15 to 20 bases long, 15 to 19 bases long, 15 to 18 bases long, 16 to 30 bases long, 16 to 29 bases long, 16 to 28 bases long, 16 to 27 bases long, 16 to 26 bases long, 16 to 25 bases long, 16 to 24 bases long, 16 to 23 bases long, 16 to 22 bases long, 16 to 21 bases long, 16 to 20 bases long, 16 to 19 bases long, 16 to 18 bases long, 17 to 30 bases long, 17 to 29 bases long, 17 to 28 bases long, 17 to 27 bases long, 17 to 26 bases long, 17 to 25 bases long, 17 to 24 bases long, 17 to 23 bases long, 17 to 22 bases long, 17 to 21 bases long, 17 to 20 bases long, 17 to 19 bases long, 17 to 18 bases long, 18 to 30 bases long, 18 to 29 bases long, 18 to 28 bases long, 18 to 27 bases long, 18 to 26 bases long, 18 to 25 bases long, 18 to 24 bases long, 18 to 23 bases long, 18 to 22 bases long, 18 to 21 bases long, 18 to 20 bases long, 18 to 19 bases long, 19 to 30 bases long, 19 to 29 bases long, 19 to 28 bases long, 19 to 27 bases long, 19 to 26 bases long, 19 to 25 bases long, 19 to 24 bases long, 19 to 23 bases long, 19 to 22 bases long, 19 to 21 bases long, 19 to 20 bases long, 20 to 30 bases long, 20 to 29 bases long, 20 to 28 bases long, 20 to 27 bases long, 20 to 26 bases long, 20 to 25 bases long, 20 to 24 bases long, 20 to 23 bases long, 20 to 22 bases long, 20 to 21 bases long, 60 bases long, 59 bases long, 58 bases long, 57 bases long, 56 bases long, 55 bases long, 54 bases long, 53 bases long, 52 bases long, 51 bases long, 50 bases long, 49 bases long, 48 bases long, 47 bases long, 46 bases long, 45 bases long, 44 bases long, 43 bases long, 42 bases long, 41 bases long, 40 bases long, 39 bases long, 38 bases long, 37 bases long, 36 bases long, 35 bases long, 34 bases long, 33 bases long, 32 bases long, 31 bases long, 30 bases long, 29 bases long, 28 bases long, 27 bases long, 26 bases long, 25 bases long, 24 bases long, 23 bases long, 22 bases long, 21 bases long, 20 bases long, 19 bases long, 18 bases long, 17 bases long, 16 bases long, 15 bases long, 14 bases long, 13 bases long, 12 bases long, 11 bases long, or 10 bases long, but not limited thereto. These lengths may be increased or decreased by 1, 2, or 3 bases.

[0308] The first antisense oligomer of the present invention is a linked-type antisense oligomer configured to comprise a plurality of unit oligomers linked to each other, a pharmaceutically acceptable salt thereof, or a hydrate thereof (hereinafter, also referred to as the “linked-type antisense oligomer of the present invention”). The unit oligomers mean respective oligomers constituting the linked-type antisense oligomer of the present invention. Specifically, the unit oligomers mean moieties (units) comprising base sequences that hybridize with target base sequences having consecutive base sequences when the linked-type antisense oligomer of the present invention binds to the target base sequences in human dystrophin pre-mRNA.

[0309] The unit oligomers may be linked via a linker that does not contribute to hybridization, or may be linked directly without the mediation of a linker. When the unit oligomers are linked directly to each other, the 3′ end of the unit positioned on the 5′ side and the 5′ end of the unit positioned on the 3′ side form a phosphate bond or any one of the following groups.

[chemical structure]

[0310] wherein X represents —OH, —CH₂R¹, —O—CH₂R¹, —S—CH₂R¹, —NR²R³ or F;
   [0311] R¹ represents H or an alkyl;
   [0312] R² and R³, which may be the same or different, each represents H, an alkyl, a cycloalkyl or an aryl;
   [0313] Y₁ represents O, S, CH₂, or NR¹;
   [0314] Y₂ represents O, S, or NR¹;
   [0315] Z represents O or S.

[0316] The first unit oligomer constituting the linked-type antisense oligomer of the present invention may comprise a base sequence complementary to a base sequence consisting of a base sequence of 11 bases in the upstream direction from the 3′ end of the 44th intron and a base sequence of 69 bases in the downstream direction from the 5′ end of the 45th exon in human dystrophin pre-mRNA, or a partial base sequence thereof. The second unit oligomer constituting the linked-type antisense oligomer of the present invention may comprise a base sequence complementary to a base sequence of from the 52nd to 75th bases in the upstream direction from the 3′ end of the 44th intron in human dystrophin pre-mRNA, or a partial base sequence thereof.

[0317] In relation to the target sequence of the unit oligomer, the term “partial” means a partial region of consecutive bases, except for the full length, of the target sequence. The partial region may be 5 to 30 bases long, 5 to 29 bases long, 5 to 28 bases long, 5 to 27 bases long, 5 to 26 bases long, 5 to 25 bases long, 5 to 24 bases long, 5 to 23 bases long, 5 to 22 bases long, 5 to 21 bases long, 5 to 20 bases long, 5 to 19 bases long, 5 to 18 bases long, 5 to 17 bases long, 5 to 16 bases long, 5 to 15 base long, 5 to 14 bases long, 5 to 13 bases long, 5 to 12 bases long, 7 to 30 bases long, 7 to 29 bases long, 7 to 28 bases long, 7 to 27 bases long, 7 to 26 bases long, 7 to 25 bases long, 7 to 24 bases long, 7 to 23 bases long, 7 to 22 bases long, 7 to 21 bases long, 7 to 20 bases long, 7 to 19 bases long, 7 to 18 bases long, 7 to 17 bases long, 7 to 16 bases long, 7 to 15 bases long, 7 to 14 bases long, 7 to 13 bases long, 7 to 12 bases long, 9 to 30 bases long, 9 to 29 bases long, 9 to 28 bases long, 9 to 27 bases long, 9 to 26 bases long, 9 to 25 bases long, 9 to 24 bases long, 9 to 23 bases long, 9 to 22 bases long, 9 to 21 bases long, 9 to 20 bases long, 9 to 19 bases long, 9 to 18 bases long, 9 to 17 bases long, 9 to 16 bases long, 9 to 15 bases long, 9 to 14 bases long, 9 to 13 bases long, 9 to 12 bases long, 10 to 30 bases long, 10 to 29 bases long, 10 to 28 bases long, 10 to 27 bases long, 10 to 26 bases long, 10 to 25 bases long, 10 to 24 bases long, 10 to 23 bases long, 10 to 22 bases long, 10 to 21 bases long, 10 to 20 bases long, 10 to 19 bases long, 10 to 18 bases long, 10 to 17 bases long, 10 to 16 bases long, 10 to 15 bases long, 10 to 14 bases long, 10 to 13 bases long, 10 to 12 bases long, 30 bases long, 29 bases long, 28 bases long, 27 bases long, 26 bases long, 25 bases long, 24 bases long, 23 bases long, 22 bases long, 21 bases long, 20 bases long, 19 bases long, 18 bases long, 17 bases long, 16 bases long, 15 bases long, 14 bases long, 13 bases long, 12 bases long, 11 bases long, 10 bases long, 9 bases long, 8 bases long, 7 bases long, 6 bases long, or 5 bases long, but is not limited thereto. These lengths may be increased or decreased by 1, 2, or 3 bases.

[0318] The size of each unit oligomer may be 5 to 30 bases long, 5 to 29 bases long, 5 to 28 bases long, 5 to 27 bases long, 5 to 26 bases long, 5 to 25 bases long, 5 to 24 bases long, 5 to 23 bases long, 5 to 22 bases long, 5 to 21 bases long, 5 to 20 bases long, 5 to 19 bases long, 5 to 18 bases long, 5 to 17 bases long, 5 to 16 bases long, 5 to 15 bases long, 5 to 14 bases long, 5 to 13 bases long, 5 to 12 bases long, 7 to 30 bases long, 7 to 29 bases long, 7 to 28 bases long, 7 to 27 bases long, 7 to 26 bases long, 7 to 25 bases long, 7 to 24 bases long, 7 to 23 bases long, 7 to 22 bases long, 7 to 21 bases long, 7 to 20 bases long, 7 to 19 bases long, 7 to 18 bases long, 7 to 17 bases long, 7 to 16 bases long, 7 to 15 bases long, 7 to 14 bases long, 7 to 13 bases long, 7 to 12 bases long, 9 to 30 bases long, 9 to 29 bases long, 9 to 28 bases long, 9 to 27 bases long, 9 to 26 bases long, 9 to 25 bases long, 9 to 24 bases long, 9 to 23 bases long, 9 to 22 bases long, 9 to 21 bases long, 9 to 20 bases long, 9 to 19 bases long, 9 to 18 bases long, 9 to 17 bases long, 9 to 16 bases long, 9 to 15 bases long, 9 to 14 bases long, 9 to 13 bases long, 9 to 12 bases long, 10 to 30 bases long, 10 to 29 bases long, 10 to 28 bases long, 10 to 27 bases long, 10 to 26 bases long, 10 to 25 bases long, 10 to 24 bases long, 10 to 23 bases long, 10 to 22 bases long, 10 to 21 bases long, 10 to 20 bases long, 10 to 19 bases long, 10 to 18 bases long, 10 to 17 bases long, 10 to 16 bases long, 10 to 15 bases long, 10 to 14 bases long, 10 to 13 bases long, 10 to 12 bases long, 30 bases long, 29 bases long, 28 bases long, 27 bases long, 26 bases long, 25 bases long, 24 bases long, 23 bases long, 22 bases long, 21 bases long, 20 bases long, 19 bases long, 18 bases long, 17 bases long, 16 bases long, 15 bases long, 14 bases long, 13 bases long, 12 bases long, 11 bases long, 10 bases long, 9 bases long, 8 bases long, 7 bases long, 6 bases long, 5 bases long, but not limited thereto. These lengths may be increased or decreased by 1, 2, or 3 bases. The unit oligomers may have the same size or different sizes.

[0319] In the first antisense oligomer, the order of the first unit oligomer and the second unit oligomer is not limited. The first antisense oligomer may comprise the first unit oligomer and the second unit oligomer from the 5′ ends in this order, or may comprise the second unit oligomer and the first unit oligomer from the 5′ ends in this order.

[0320] In one embodiment, the first unit oligomer comprises or consists of a base sequence complementary to consecutive 15 to 30 bases of a base sequence consisting of a base sequence 11 bases in the upstream direction from the 3′ end of the 44th intron and a base sequence of 69 bases in the downstream direction from the 5′ end of the 45th exon in human dystrophin pre-mRNA. In one embodiment, the second unit oligomer comprises or consists of a base sequence complementary to consecutive 1 to 10 bases of a base sequence of from the 52nd to 75th bases in the upstream direction from the 3′ end of the 44th intron in human dystrophin pre-mRNA. In one embodiment, the second antisense oligomer comprises a base sequence complementary to consecutive 15 to 30 bases of a base sequence consisting of a base sequence of 33 bases in the upstream direction from the 3′ end of the 54th intron and a base sequence of 53 bases in the downstream direction from the 5′ end of the 55th exon in human dystrophin pre-mRNA. In one embodiment, the third antisense oligomer comprises or consists of a base sequence complementary to consecutive 15 to 30 bases of a base sequence consisting of a base sequence of 23 bases in the upstream direction from the 3′ end of the 45th exon and a base sequence of 73 bases in the downstream direction from the 5′ end of the 45th intron in the human dystrophin pre-mRNA.

[0321] Table 4 below shows examples of the target sequence of the first unit oligomer, and the complementary sequence (antisense sequence) thereof.

TABLE 4

| Length | Target | | SEQ | Antisense sequence | SEQ |
|---|---|---|---|---|---|
| mer | site | Target sequence | ID NO: | (5′ to 3′) | ID NO: |
| 15 | H45_5-19 | TCCAGGATGGCATTG | 211 | CAATGCCATCCTGGA | 907 |
| 15 | H45_6-20 | CCAGGATGGCATTGG | 212 | CCAATGCCATCCTGG | 908 |
| 15 | H45_7-21 | CAGGATGGCATTGGG | 213 | CCCAATGCCATCCTG | 909 |
| 15 | H45_8-22 | AGGATGGCATTGGGC | 214 | GCCCAATGCCATCCT | 910 |
| 15 | H45_9-23 | GGATGGCATTGGGCA | 215 | TGCCCAATGCCATCC | 911 |
| 15 | H45_10- | GATGGCATTGGGCAG | 216 | CTGCCCAATGCCATC | 912 |
| | 24 | | | | |
| 15 | H45_11- | ATGGCATTGGGCAGC | 217 | GCTGCCCAATGCCAT | 913 |
| | 25 | | | | |
| 15 | H45_12- | TGGCATTGGGCAGCG | 218 | CGCTGCCCAATGCCA | 914 |
| | 26 | | | | |
| 15 | H45_13- | GGCATTGGGCAGCGG | 219 | CCGCTGCCCAATGCC | 915 |
| | 27 | | | | |
| 15 | H45_14- | GCATTGGGCAGCGGC | 220 | GCCGCTGCCCAATGC | 916 |
| | 28 | | | | |
| 15 | H45_15- | CATTGGGCAGCGGCA | 221 | TGCCGCTGCCCAATG | 917 |
| | 29 | | | | |
| 15 | H45_16- | ATTGGGCAGCGGCAA | 222 | TTGCCGCTGCCCAAT | 918 |
| | 30 | | | | |
| 15 | H45_17- | TTGGGCAGCGGCAAA | 223 | TTTGCCGCTGCCCAA | 919 |
| | 31 | | | | |
| 15 | H45_18- | TGGGCAGCGGCAAAC | 224 | GTTTGCCGCTGCCCA | 920 |
| | 32 | | | | |
| 15 | H45_19 | GGGCAGCGGCAAACT | 225 | AGTTTGCCGCTGCCC | 921 |
| | 33 | | | | |
| 15 | H45_20- | GGCAGCGGCAAACTG | 226 | CAGTTTGCCGCTGCC | 922 |
| | 34 | | | | |
| 15 | H45_21- | GCAGCGGCAAACTGT | 227 | ACAGTTTGCCGCTGC | 923 |
| | 35 | | | | |
| 15 | H45_22- | CAGCGGCAAACTGTT | 228 | AACAGTTTGCCGCTG | 924 |
| | 36 | | | | |
| 15 | H45_23- | AGCGGCAAACTGTTG | 229 | CAACAGTTTGCCGCT | 925 |
| | 37 | | | | |
| 15 | H45_24- | GCGGCAAACTGTTGT | 230 | ACAACAGTTTGCCGC | 926 |
| | 38 | | | | |
| 15 | H45_25- | CGGCAAACTGTTGTC | 231 | GACAACAGTTTGCCG | 927 |
| | 39 | | | | |
| 15 | H45_26- | GGCAAACTGTTGTCA | 232 | TGACAACAGTTTGCC | 928 |
| | 40 | | | | |
| 15 | H45_27- | GCAAACTGTTGTCAG | 233 | CTGACAACAGTTTGC | 929 |
| | 41 | | | | |
| 15 | H45_28- | CAAACTGTTGTCAGA | 234 | TCTGACAACAGTTTG | 930 |
| | 42 | | | | |
| 15 | H45_29- | AAACTGTTGTCAGAA | 235 | TTCTGACAACAGTTT | 931 |
| | 43 | | | | |
| 15 | H45_30 | AACTGTTGTCAGAAC | 236 | GTTCTGACAACAGTT | 932 |
| | 44 | | | | |
| 15 | H45_31- | ACTGTTGTCAGAACA | 237 | TGTTCTGACAACAGT | 933 |
| | 45 | | | | |
| 15 | H45_32- | CTGTTGTCAGAACAT | 238 | ATGTTCTGACAACAG | 934 |
| | 46 | | | | |
| 15 | H45_33- | TGTTGTCAGAACATT | 239 | AATGTTCTGACAACA | 935 |
| | 47 | | | | |
| 15 | H45_34- | GTTGTCAGAACATTG | 240 | CAATGTTCTGACAAC | 936 |
| | 48 | | | | |
| 15 | H45_35- | TTGTCAGAACATTGA | 241 | TCAATGTTCTGACAA | 937 |
| | 49 | | | | |
| 15 | H45_36- | TGTCAGAACATTGAA | 242 | TTCAATGTTCTGACA | 938 |
| | 50 | | | | |
| 15 | H45_37- | GTCAGAACATTGAAT | 243 | ATTCAATGTTCTGAC | 939 |
| | 51 | | | | |
| 15 | H45_38- | TCAGAACATTGAATG | 244 | CATTCAATGTTCTGA | 940 |
| | 52 | | | | |
| 15 | H45_39- | CAGAACATTGAATGC | 245 | GCATTCAATGTTCTG | 941 |
| | 53 | | | | |
| 15 | H45_40- | AGAACATTGAATGCA | 246 | TGCATTCAATGTTCT | 942 |
| | 54 | | | | |
| 16 | H45_4-19 | CTCCAGGATGGCATTG | 247 | CAATGCCATCCTGGAG | 943 |
| 16 | H45_5-20 | TCCAGGATGGCATTGG | 248 | CCAATGCCATCCTGGA | 944 |
| 16 | H45_6-21 | CCAGGATGGCATTGGG | 249 | CCCAATGCCATCCTGG | 945 |
| 16 | H45_7-22 | CAGGATGGCATTGGGC | 250 | GCCCAATGCCATCCTG | 946 |
| 16 | H45_8-23 | AGGATGGCATTGGGCA | 251 | TGCCCAATGCCATCCT | 947 |
| 16 | H45_9-24 | GGATGGCATTGGGCAG | 252 | CTGCCCAATGCCATCC | 948 |
| 16 | H45_10- | GATGGCATTGGGCAGC | 253 | GCTGCCCAATGCCATC | 949 |
| | 25 | | | | |
| 16 | H45_11- | ATGGCATTGGGCAGCG | 254 | CGCTGCCCAATGCCAT | 950 |
| | 26 | | | | |
| 16 | H45_12- | TGGCATTGGGCAGCGG | 255 | CCGCTGCCCAATGCCA | 951 |
| | 27 | | | | |
| 16 | H45_13- | GGCATTGGGCAGCGGC | 256 | GCCGCTGCCCAATGCC | 952 |
| | 28 | | | | |
| 16 | H45_14- | GCATTGGGCAGCGGCA | 257 | TGCCGCTGCCCAATGC | 953 |
| | 29 | | | | |
| 16 | H45_15- | CATTGGGCAGCGGCAA | 258 | TTGCCGCTGCCCAATG | 954 |
| | 30 | | | | |
| 16 | H45_16- | ATTGGGCAGCGGCAAA | 259 | TTTGCCGCTGCCCAAT | 955 |
| | 31 | | | | |
| 16 | H45_17- | TTGGGCAGCGGCAAAC | 260 | GTTTGCCGCTGCCCAA | 956 |
| | 32 | | | | |
| 16 | H45_18- | TGGGCAGCGGCAAACT | 261 | AGTTTGCCGCTGCCCA | 957 |
| | 33 | | | | |
| 16 | H45_19- | GGGCAGCGGCAAACTG | 262 | CAGTTTGCCGCTGCCC | 958 |
| | 34 | | | | |
| 16 | H45_20- | GGCAGCGGCAAACTGT | 263 | ACAGTTTGCCGCTGCC | 959 |
| | 35 | | | | |
| 16 | H45_21- | GCAGCGGCAAACTGTT | 264 | AACAGTTTGCCGCTGC | 960 |
| | 36 | | | | |
| 16 | H45_22- | CAGCGGCAAACTGTTG | 265 | CAACAGTTTGCCGCTG | 961 |
| | 37 | | | | |
| 16 | H45_23- | AGCGGCAAACTGTTGT | 266 | ACAACAGTTTGCCGCT | 962 |
| | 38 | | | | |
| 16 | H45_24- | GCGGCAAACTGTTGTC | 267 | GACAACAGTTTGCCGC | 963 |
| | 39 | | | | |
| 16 | H45_25- | CGGCAAACTGTTGTCA | 268 | TGACAACAGTTTGCCG | 964 |
| | 40 | | | | |
| 16 | H45_26- | GGCAAACTGTTGTCAG | 269 | CTGACAACAGTTTGCC | 965 |
| | 41 | | | | |
| 16 | H45_27- | GCAAACTGTTGTCAGA | 270 | TCTGACAACAGTTTGC | 966 |
| | 42 | | | | |
| 16 | H45_28- | CAAACTGTTGTCAGAA | 271 | TTCTGACAACAGTTTG | 967 |
| | 43 | | | | |
| 16 | H45_29- | AAACTGTTGTCAGAAC | 272 | GTTCTGACAACAGTTT | 968 |
| | 44 | | | | |
| 16 | H45_30- | AACTGTTGTCAGAACA | 273 | TGTTCTGACAACAGTT | 969 |
| | 45 | | | | |
| 16 | H45_31- | ACTGTTGTCAGAACAT | 274 | ATGTTCTGACAACAGT | 970 |
| | 46 | | | | |
| 16 | H45_32- | CTGTTGTCAGAACATT | 275 | AATGTTCTGACAACAG | 971 |
| | 47 | | | | |
| 16 | H45_33- | TGTTGTCAGAACATTG | 276 | CAATGTTCTGACAACA | 972 |
| | 48 | | | | |
| 16 | H45_34- | GTTGTCAGAACATTGA | 277 | TCAATGTTCTGACAAC | 973 |
| | 49 | | | | |
| 16 | H45_35- | TTGTCAGAACATTGAA | 278 | TTCAATGTTCTGACAA | 974 |
| | 50 | | | | |
| 16 | H45_36- | TGTCAGAACATTGAAT | 279 | ATTCAATGTTCTGACA | 975 |
| | 51 | | | | |
| 16 | H45_37- | GTCAGAACATTGAATG | 280 | CATTCAATGTTCTGAC | 976 |
| | 52 | | | | |
| 16 | H45_38- | TCAGAACATTGAATGC | 281 | GCATTCAATGTTCTGA | 977 |
| | 53 | | | | |
| 16 | H45_39- | CAGAACATTGAATGCA | 282 | TGCATTCAATGTTCTG | 978 |
| | 54 | | | | |
| 16 | H45_40- | AGAACATTGAATGCAA | 283 | TTGCATTCAATGTTCT | 979 |
| | 55 | | | | |
| 17 | H45_3-19 | ACTCCAGGATGGCATTG | 284 | CAATGCCATCCTGGAGT | 980 |
| 17 | H45_4-20 | CTCCAGGATGGCATTGG | 285 | CCAATGCCATCCTGGAG | 981 |
| 17 | H45_5-21 | TCCAGGATGGCATTGGG | 286 | CCCAATGCCATCCTGGA | 982 |
| 17 | H45_6-22 | CCAGGATGGCATTGGGC | 287 | GCCCAATGCCATCCTGG | 983 |
| 17 | H45_7-23 | CAGGATGGCATTGGGCA | 288 | TGCCCAATGCCATCCTG | 984 |
| 17 | H45_8-24 | AGGATGGCATTGGGCAG | 289 | CTGCCCAATGCCATCCT | 985 |
| 17 | H45_9-25 | GGATGGCATTGGGCAGC | 290 | GCTGCCCAATGCCATCC | 986 |
| 17 | H45_10- | GATGGCATTGGGCAGCG | 291 | CGCTGCCCAATGCCATC | 987 |
| | 26 | | | | |
| 17 | H45_11- | ATGGCATTGGGCAGCGG | 292 | CCGCTGCCCAATGCCAT | 988 |
| | 27 | | | | |
| 17 | H45_12- | TGGCATTGGGCAGCGGC | 293 | GCCGCTGCCCAATGCCA | 989 |
| | 28 | | | | |
| 17 | H45_13- | GGCATTGGGCAGCGGCA | 294 | TGCCGCTGCCCAATGCC | 990 |
| | 29 | | | | |
| 17 | H45_14- | GCATTGGGCAGCGGCAA | 295 | TTGCCGCTGCCCAATGC | 991 |
| | 30 | | | | |
| 17 | H45_15- | CATTGGGCAGCGGCAAA | 296 | TTTGCCGCTGCCCAATG | 992 |
| | 31 | | | | |
| 17 | H45_16- | ATTGGGCAGCGGCAAAC | 297 | GTTTGCCGCTGCCCAAT | 993 |
| | 32 | | | | |
| 17 | H45_17- | TTGGGCAGCGGCAAACT | 298 | AGTTTGCCGCTGCCCAA | 994 |
| | 33 | | | | |
| 17 | H45_18- | TGGGCAGCGGCAAACTG | 299 | CAGTTTGCCGCTGCCCA | 995 |
| | 34 | | | | |
| 17 | H45_19- | GGGCAGCGGCAAACTGT | 300 | ACAGTTTGCCGCTGCCC | 996 |
| | 35 | | | | |
| 17 | H45_20- | GGCAGCGGCAAACTGTT | 301 | AACAGTTTGCCGCTGCC | 997 |
| | 36 | | | | |
| 17 | H45_21- | GCAGCGGCAAACTGTTG | 302 | CAACAGTTTGCCGCTGC | 998 |
| | 37 | | | | |
| 17 | H45_22- | CAGCGGCAAACTGTTGT | 303 | ACAACAGTTTGCCGCTG | 999 |
| | 38 | | | | |
| 17 | H45_23- | AGCGGCAAACTGTTGTC | 304 | GACAACAGTTTGCCGCT | 1000 |
| | 39 | | | | |
| 17 | H45_24- | GCGGCAAACTGTTGTCA | 305 | TGACAACAGTTTGCCGC | 1001 |
| | 40 | | | | |
| 17 | H45_25- | CGGCAAACTGTTGTCAG | 306 | CTGACAACAGTTTGCCG | 1002 |
| | 41 | | | | |
| 17 | H45_26- | GGCAAACTGTTGTCAGA | 307 | TCTGACAACAGTTTGCC | 1003 |
| | 42 | | | | |
| 17 | H45_27- | GCAAACTGTTGTCAGAA | 308 | TTCTGACAACAGTTTGC | 1004 |
| | 43 | | | | |
| 17 | H45_28- | CAAACTGTTGTCAGAAC | 309 | GTTCTGACAACAGTTTG | 1005 |
| | 44 | | | | |
| 17 | H45_29- | AAACTGTTGTCAGAACA | 310 | TGTTCTGACAACAGTTT | 1006 |
| | 45 | | | | |
| 17 | H45_30- | AACTGTTGTCAGAACAT | 311 | ATGTTCTGACAACAGTT | 1007 |
| | 46 | | | | |
| 17 | H45_31- | ACTGTTGTCAGAACATT | 312 | AATGTTCTGACAACAGT | 1008 |
| | 47 | | | | |
| 17 | H45_32- | CTGTTGTCAGAACATTG | 313 | CAATGTTCTGACAACAG | 1009 |
| | 48 | | | | |
| 17 | H45_33- | TGTTGTCAGAACATTGA | 314 | TCAATGTTCTGACAACA | 1010 |
| | 49 | | | | |
| 17 | H45_34- | GTTGTCAGAACATTGAA | 315 | TTCAATGTTCTGACAAC | 1011 |
| | 50 | | | | |
| 17 | H45_35- | TTGTCAGAACATTGAAT | 316 | ATTCAATGTTCTGACAA | 1012 |
| | 51 | | | | |
| 17 | H45_36- | TGTCAGAACATTGAATG | 317 | CATTCAATGTTCTGACA | 1013 |
| | 52 | | | | |
| 17 | H45_37- | GTCAGAACATTGAATGC | 318 | GCATTCAATGTTCTGAC | 1014 |
| | 53 | | | | |
| 17 | H45_38- | TCAGAACATTGAATGCA | 319 | TGCATTCAATGTTCTGA | 1015 |
| | 54 | | | | |
| 17 | H45_39- | CAGAACATTGAATGCAA | 320 | TTGCATTCAATGTTCTG | 1016 |
| | 55 | | | | |
| 17 | H45_40- | AGAACATTGAATGCAAC | 321 | GTTGCATTCAATGTTCT | 1017 |
| | 56 | | | | |
| 18 | H45_2-19 | AACTCCAGGATGGCATTG | 322 | CAATGCCATCCTGGAGTT | 1018 |
| 18 | H45_3-20 | ACTCCAGGATGGCATTGG | 323 | CCAATGCCATCCTGGAGT | 1019 |
| 18 | H45_4-21 | CTCCAGGATGGCATTGGG | 324 | CCCAATGCCATCCTGGAG | 1020 |
| 18 | H45_5-22 | TCCAGGATGGCATTGGGC | 325 | GCCCAATGCCATCCTGGA | 1021 |
| 18 | H45_6-23 | CCAGGATGGCATTGGGCA | 326 | TGCCCAATGCCATCCTGG | 1022 |
| 18 | H45_7-24 | CAGGATGGCATTGGGCAG | 327 | CTGCCCAATGCCATCCTG | 1023 |
| 18 | H45_8-25 | AGGATGGCATTGGGCAGC | 328 | GCTGCCCAATGCCATCCT | 1024 |
| 18 | H45_9-26 | GGATGGCATTGGGCAGCG | 329 | CGCTGCCCAATGCCATCC | 1025 |
| 18 | H45_10- | GATGGCATTGGGCAGCGG | 330 | CCGCTGCCCAATGCCATC | 1026 |
| | 27 | | | | |
| 18 | H45_11- | ATGGCATTGGGCAGCGGC | 331 | GCCGCTGCCCAATGCCAT | 1027 |
| | 28 | | | | |
| 18 | H45_12- | TGGCATTGGGCAGCGGCA | 332 | TGCCGCTGCCCAATGCCA | 1028 |
| | 29 | | | | |
| 18 | H45_13- | GGCATTGGGCAGCGGCAA | 333 | TTGCCGCTGCCCAATGCC | 1029 |
| | 30 | | | | |
| 18 | H45_14- | GCATTGGGCAGCGGCAAA | 334 | TTTGCCGCTGCCCAATGC | 1030 |
| | 31 | | | | |
| 18 | H45_15- | CATTGGGCAGCGGCAAAC | 335 | GTTTGCCGCTGCCCAATG | 1031 |
| | 32 | | | | |
| 18 | H45_16- | ATTGGGCAGCGGCAAACT | 336 | AGTTTGCCGCTGCCCAAT | 1032 |
| | 33 | | | | |
| 18 | H45_17- | TTGGGCAGCGGCAAACTG | 337 | CAGTTTGCCGCTGCCCAA | 1033 |
| | 34 | | | | |
| 18 | H45_18- | TGGGCAGCGGCAAACTGT | 338 | ACAGTTTGCCGCTGCCCA | 1034 |
| | 35 | | | | |
| 18 | H45_19- | GGGCAGCGGCAAACTGTT | 339 | AACAGTTTGCCGCTGCCC | 1035 |
| | 36 | | | | |
| 18 | H45_20- | GGCAGCGGCAAACTGTTG | 340 | CAACAGTTTGCCGCTGCC | 1036 |
| | 37 | | | | |
| 18 | H45_21- | GCAGCGGCAAACTGTTGT | 341 | ACAACAGTTTGCCGCTGC | 1037 |
| | 38 | | | | |
| 18 | H45_22- | CAGCGGCAAACTGTTGTC | 342 | GACAACAGTTTGCCGCTG | 1038 |
| | 39 | | | | |
| 18 | H45_23- | AGCGGCAAACTGTTGTCA | 343 | TGACAACAGTTTGCCGCT | 1039 |
| | 40 | | | | |
| 18 | H45_24- | GCGGCAAACTGTTGTCAG | 344 | CTGACAACAGTTTGCCGC | 1040 |
| | 41 | | | | |
| 18 | H45_25- | CGGCAAACTGTTGTCAGA | 345 | TCTGACAACAGTTTGCCG | 1041 |
| | 42 | | | | |
| 18 | H45_26- | GGCAAACTGTTGTCAGAA | 346 | TTCTGACAACAGTTTGCC | 1042 |
| | 43 | | | | |
| 18 | H45_27- | GCAAACTGTTGTCAGAAC | 347 | GTTCTGACAACAGTTTGC | 1043 |
| | 44 | | | | |
| 18 | H45_28- | CAAACTGTTGTCAGAACA | 348 | TGTTCTGACAACAGTTTG | 1044 |
| | 45 | | | | |
| 18 | H45_29- | AAACTGTTGTCAGAACAT | 349 | ATGTTCTGACAACAGTTT | 1045 |
| | 46 | | | | |
| 18 | H45_30- | AACTGTTGTCAGAACATT | 350 | AATGTTCTGACAACAGTT | 1046 |
| | 47 | | | | |
| 18 | H45_31- | ACTGTTGTCAGAACATTG | 351 | CAATGTTCTGACAACAGT | 1047 |
| | 48 | | | | |
| 18 | H45_32 | CTGTTGTCAGAACATTGA | 352 | TCAATGTTCTGACAACAG | 1048 |
| | 49 | | | | |
| 18 | H45_33- | TGTTGTCAGAACATTGAA | 353 | TTCAATGTTCTGACAACA | 1049 |
| | 50 | | | | |
| 18 | H45_34- | GTTGTCAGAACATTGAAT | 354 | ATTCAATGTTCTGACAAC | 1050 |
| | 51 | | | | |
| 18 | H45_35- | TTGTCAGAACATTGAATG | 355 | CATTCAATGTTCTGACAA | 1051 |
| | 52 | | | | |
| 18 | H45_36- | TGTCAGAACATTGAATGC | 356 | GCATTCAATGTTCTGACA | 1052 |
| | 53 | | | | |
| 18 | H45_37- | GTCAGAACATTGAATGCA | 357 | TGCATTCAATGTTCTGAC | 1053 |
| | 54 | | | | |
| 18 | H45_38- | TCAGAACATTGAATGCAA | 358 | TTGCATTCAATGTTCTGA | 1054 |
| | 55 | | | | |
| 18 | H45_39- | CAGAACATTGAATGCAAC | 359 | GTTGCATTCAATGTTCTG | 1055 |
| | 56 | | | | |
| 18 | H45_40- | AGAACATTGAATGCAACT | 360 | AGTTGCATTCAATGTTCT | 1056 |
| | 57 | | | | |
| 19 | H45_1-19 | GAACTCCAGGATGGCATTG | 361 | CAATGCCATCCTGGAGTTC | 1057 |
| 19 | H45_2-20 | AACTCCAGGATGGCATTGG | 362 | CCAATGCCATCCTGGAGTT | 1058 |
| 19 | H45_3-21 | ACTCCAGGATGGCATTGGG | 363 | CCCAATGCCATCCTGGAGT | 1059 |
| 19 | H45_4-22 | CTCCAGGATGGCATTGGGC | 364 | GCCCAATGCCATCCTGGAG | 1060 |
| 19 | H45_5-23 | TCCAGGATGGCATTGGGCA | 365 | TGCCCAATGCCATCCTGGA | 1061 |
| 19 | H45_6-24 | CCAGGATGGCATTGGGCAG | 366 | CTGCCCAATGCCATCCTGG | 1062 |
| 19 | H45_7-25 | CAGGATGGCATTGGGCAGC | 367 | GCTGCCCAATGCCATCCTG | 1063 |
| 19 | H45_8-26 | AGGATGGCATTGGGCAGCG | 368 | CGCTGCCCAATGCCATCCT | 1064 |
| 19 | H45_9-27 | GGATGGCATTGGGCAGCGG | 369 | CCGCTGCCCAATGCCATCC | 1065 |
| 19 | H45_10- | GATGGCATTGGGCAGCGGC | 370 | GCCGCTGCCCAATGCCATC | 1066 |
| | 28 | | | | |
| 19 | H45_11- | ATGGCATTGGGCAGCGGCA | 371 | TGCCGCTGCCCAATGCCAT | 1067 |
| | 29 | | | | |
| 19 | H45_12- | TGGCATTGGGCAGCGGCAA | 372 | TTGCCGCTGCCCAATGCCA | 1068 |
| | 30 | | | | |
| 19 | H45_13- | GGCATTGGGCAGCGGCAAA | 373 | TTTGCCGCTGCCCAATGCC | 1069 |
| | 31 | | | | |
| 19 | H45_14- | GCATTGGGCAGCGGCAAAC | 374 | GTTTGCCGCTGCCCAATGC | 1070 |
| | 32 | | | | |
| 19 | H45_15- | CATTGGGCAGCGGCAAACT | 375 | AGTTTGCCGCTGCCCAATG | 1071 |
| | 33 | | | | |
| 19 | H45_16- | ATTGGGCAGCGGCAAACTG | 376 | CAGTTTGCCGCTGCCCAAT | 1072 |
| | 34 | | | | |
| 19 | H45_17- | TTGGGCAGCGGCAAACTGT | 377 | ACAGTTTGCCGCTGCCCAA | 1073 |
| | 35 | | | | |
| 19 | H45_18- | TGGGCAGCGGCAAACTGTT | 378 | AACAGTTTGCCGCTGCCCA | 1074 |
| | 36 | | | | |
| 19 | H45_19- | GGGCAGCGGCAAACTGTTG | 379 | CAACAGTTTGCCGCTGCCC | 1075 |
| | 37 | | | | |
| 19 | H45_20- | GGCAGCGGCAAACTGTTGT | 380 | ACAACAGTTTGCCGCTGCC | 1076 |
| | 38 | | | | |
| 19 | H45_21- | GCAGCGGCAAACTGTTGTC | 381 | GACAACAGTTTGCCGCTGC | 1077 |
| | 39 | | | | |
| 19 | H45_22- | CAGCGGCAAACTGTTGTCA | 382 | TGACAACAGTTTGCCGCTG | 1078 |
| | 40 | | | | |
| 19 | H45_23- | AGCGGCAAACTGTTGTCAG | 383 | CTGACAACAGTTTGCCGCT | 1079 |
| | 41 | | | | |
| 19 | H45_24- | GCGGCAAACTGTTGTCAGA | 384 | TCTGACAACAGTTTGCCGC | 1080 |
| | 42 | | | | |
| 19 | H45_25- | CGGCAAACTGTTGTCAGAA | 385 | TTCTGACAACAGTTTGCCG | 1081 |
| | 43 | | | | |
| 19 | H45_26- | GGCAAACTGTTGTCAGAAC | 386 | GTTCTGACAACAGTTTGCC | 1082 |
| | 44 | | | | |
| 19 | H45_27- | GCAAACTGTTGTCAGAACA | 387 | TGTTCTGACAACAGTTTGC | 1083 |
| | 45 | | | | |
| 19 | H45_28- | CAAACTGTTGTCAGAACAT | 388 | ATGTTCTGACAACAGTTTG | 1084 |
| | 46 | | | | |
| 19 | H45_29- | AAACTGTTGTCAGAACATT | 389 | AATGTTCTGACAACAGTTT | 1085 |
| | 47 | | | | |
| 19 | H45_30- | AACTGTTGTCAGAACATTG | 390 | CAATGTTCTGACAACAGTT | 1086 |
| | 48 | | | | |
| 19 | H45_31- | ACTGTTGTCAGAACATTGA | 391 | TCAATGTTCTGACAACAGT | 1087 |
| | 49 | | | | |
| 19 | H45_32- | CTGTTGTCAGAACATTGAA | 392 | TTCAATGTTCTGACAACAG | 1088 |
| | 50 | | | | |
| 19 | H45_33- | TGTTGTCAGAACATTGAAT | 393 | ATTCAATGTTCTGACAACA | 1089 |
| | 51 | | | | |
| 19 | H45_34- | GTTGTCAGAACATTGAATG | 394 | CATTCAATGTTCTGACAAC | 1090 |
| | 52 | | | | |
| 19 | H45_35- | TTGTCAGAACATTGAATGC | 395 | GCATTCAATGTTCTGACAA | 1091 |
| | 53 | | | | |
| 19 | H45_36- | TGTCAGAACATTGAATGCA | 396 | TGCATTCAATGTTCTGACA | 1092 |
| | 54 | | | | |
| 19 | H45_37- | GTCAGAACATTGAATGCAA | 397 | TTGCATTCAATGTTCTGAC | 1093 |
| | 55 | | | | |
| 19 | H45_38- | TCAGAACATTGAATGCAAC | 398 | GTTGCATTCAATGTTCTGA | 1094 |
| | 56 | | | | |
| 19 | H45_39- | CAGAACATTGAATGCAACT | 399 | AGTTGCATTCAATGTTCTG | 1095 |
| | 57 | | | | |
| 19 | H45_40- | AGAACATTGAATGCAACTG | 400 | CAGTTGCATTCAATGTTCT | 1096 |
| | 58 | | | | |
| 20 | H45_ | GGAACTCCAGGATGGCATTG | 401 | CAATGCCATCCTGGAGTTCC | 1097 |
| | (−1)-19 | | | | |
| 20 | H45_1-20 | GAACTCCAGGATGGCATTGG | 402 | CCAATGCCATCCTGGAGTTC | 1098 |
| 20 | H45_2-21 | AACTCCAGGATGGCATTGGG | 403 | CCCAATGCCATCCTGGAGTT | 1099 |
| 20 | H45_3-22 | ACTCCAGGATGGCATTGGGC | 404 | GCCCAATGCCATCCTGGAGT | 1100 |
| 20 | H45_4-23 | CTCCAGGATGGCATTGGGCA | 405 | TGCCCAATGCCATCCTGGAG | 1101 |
| 20 | H45_5-24 | TCCAGGATGGCATTGGGCAG | 406 | CTGCCCAATGCCATCCTGGA | 1102 |
| 20 | H45_6-25 | CCAGGATGGCATTGGGCAGC | 407 | GCTGCCCAATGCCATCCTGG | 1103 |
| 20 | H45_7-26 | CAGGATGGCATTGGGCAGCG | 408 | CGCTGCCCAATGCCATCCTG | 1104 |
| 20 | H45_8-27 | AGGATGGCATTGGGCAGCGG | 409 | CCGCTGCCCAATGCCATCCT | 1105 |
| 20 | H45_9-28 | GGATGGCATTGGGCAGCGGC | 410 | GCCGCTGCCCAATGCCATCC | 1106 |

[0322] In one embodiment, the first unit oligomer comprises a base sequence complementary to:
[0323] (a) any one base sequence selected from the group consisting of SEQ ID NOs: 211 to 906;
[0324] (b) a base sequence that hybridizes under stringent conditions to a base sequence complementary to any one base sequence selected from the group consisting of SEQ ID NOs: 211 to 906;
[0325] (c) a base sequence that has at least 85% identity with any one base sequence selected from the group consisting of SEQ ID NOs: 211 to 906, and has a length within ±15% of the length of the any one base sequence selected; or
[0326] (d) a partial base sequence of any one base sequence selected from the group consisting of the base sequences (a), (b), and (c).

[0327] Herein, the base sequence (c) is a mutant type of the base sequence (a), and examples of such a mutant type also include
[0328] (c-1) a base sequence that has at least 85% identity with any one base sequence selected from the group consisting of SEQ ID Nos: 211 to 906, and has a length within ±15% of the length of the any one base sequence selected,
[0329] (c-2) a base sequence that has at least 86% identity with any one base sequence selected from the group consisting of SEQ ID NOS: 211 to 906, and has a length within ±14% of the length of the any one base sequence selected,
[0330] (c-3) a base sequence that has at least 87% identity with any one base sequence selected from the group consisting of SEQ ID NOS: 211 to 906, and has a length within ±13% of the length of the any one base sequence selected,
[0331] (c-4) a base sequence that has at least 88% identity with any one base sequence selected from the group consisting of SEQ ID NOs: 211 to 906, and has a length within ±12% of the length of the any one base sequence selected,
[0332] (c-5) a base sequence that has at least 89% identity with any one base sequence selected from the group consisting of SEQ ID NOS: 211 to 906, and has a length within ±11% of the length of the any one base sequence selected,
[0333] (c-6) a base sequence that has at least 90% identity with any one base sequence selected from the group consisting of SEQ ID NOs: 211 to 906, and has a length within ±10% of the length of the any one base sequence selected,
[0334] (c-7) a base sequence that has at least 91% identity with any one base sequence selected from the group consisting of SEQ ID NOS: 211 to 906, and has a length within ±9% of the length of the any one base sequence selected,
[0335] (c-8) a base sequence that has at least 92% identity with any one base sequence selected from the group consisting of SEQ ID NOS: 211 to 906, and has a length within ±8% of the length of the any one base sequence selected,
[0336] (c-9) a base sequence that has at least 93% identity with any one base sequence selected from the group consisting of SEQ ID NOS: 211 to 906, and has a length within ±7% of the length of the any one base sequence selected,
[0337] (c-10) a base sequence that has at least 94% identity with any one base sequence selected from the group consisting of SEQ ID NOs: 211 to 906, and has a length within ±6% of the length of the any one base sequence selected,
[0338] (c-11) a base sequence that has at least 95% identity with any one base sequence selected from the group consisting of SEQ ID NOs: 211 to 906, and has a length within ±5% of the length of the any one base sequence selected,
[0339] (c-12) a base sequence that has at least 96% identity with any one base sequence selected from the group consisting of SEQ ID NOs: 211 to 906, and has a length within ±4% of the length of the any one base sequence selected,
[0340] (c-13) a base sequence that has at least 97% identity with any one base sequence selected from the group consisting of SEQ ID NOS: 211 to 906, and has a length within ±3% of the length of the any one base sequence selected,
[0341] (c-14) a base sequence that has at least 98% identity with any one base sequence selected from the group consisting of SEQ ID NOs: 211 to 906, and has a length within ±2% of the length of the any one base sequence selected,
[0342] (c-15) a base sequence that has at least 99% identity with any one base sequence selected from the group consisting of SEQ ID NOs: 211 to 906, and has a length within ±1% of the length of the any one base sequence selected, and
[0343] (c-16) a base sequence that has at least 99.5% identity with any one base sequence selected from the group consisting of SEQ ID NOs: 211 to 906, and has a length within ±0.5% of the length of the any one base sequence selected.

[0344] In one embodiment, the first unit oligomer comprises or consists of:
[0345] (a) any one base sequence selected from the group consisting of SEQ ID NOs: 907 to 1602; or
[0346] (b) a base sequence that has at least 85% identity with any one base sequence selected from the group consisting of SEQ ID NOs: 907 to 1602, and has a length within ±15% of the length of the any one base sequence selected.

[0347] Herein, the base sequence (b) is a mutant type of the base sequence (a), and examples of such a mutant type also include:
[0348] (b-1) a base sequence that has at least 85% identity with any one base sequence selected from the group consisting of SEQ ID NOs: 907 to 1602, and has a length within ±15% of the length of the any one base sequence selected,
[0349] (b-2) a base sequence that has at least 86% identity with any one base sequence selected from the group consisting of SEQ ID NOs: 907 to 1602, and has a length within ±14% of the length of the any one base sequence selected,
[0350] (b-3) a base sequence that has at least 87% identity with any one base sequence selected from the group consisting of SEQ ID NOs: 907 to 1602, and has a length within ±13% of the length of the any one base sequence selected,
[0351] (b-4) a base sequence that has at least 88% identity with any one base sequence selected from the group consisting of SEQ ID NOs: 907 to 1602, and has a length within ±12% of the length of the any one base sequence selected,
[0352] (b-5) a base sequence that has at least 89% identity with any one base sequence selected from the group consisting of SEQ ID NOs: 907 to 1602, and has a length within ±11% of the length of the any one base sequence selected,
[0353] (b-6) a base sequence that has at least 90% identity with any one base sequence selected from the group consisting of SEQ ID NOs: 907 to 1602, and has a length within ±10% of the length of the any one base sequence selected,
[0354] (b-7) a base sequence that has at least 91% identity with any one base sequence selected from the group consisting of SEQ ID NOs: 907 to 1602, and has a length within ±9% of the length of the any one base sequence selected,
[0355] (b-8) a base sequence that has at least 92% identity with any one base sequence selected from the group consisting of SEQ ID NOs: 907 to 1602, and has a length within ±8% of the length of the any one base sequence selected,
[0356] (b-9) a base sequence that has at least 93% identity with any one base sequence selected from the group consisting of SEQ ID NOs: 907 to 1602, and has a length within ±7% of the length of the any one base sequence selected,
[0357] (b-10) a base sequence that has at least 94% identity with any one base sequence selected from the group consisting of SEQ ID NOs: 907 to 1602, and has a length within ±6% of the length of the any one base sequence selected,
[0358] (b-11) a base sequence that has at least 95% identity with any one base sequence selected from the group consisting of SEQ ID NOs: 907 to 1602, and has a length within ±5% of the length of the any one base sequence selected,
[0359] (b-12) a base sequence that has at least 96% identity with any one base sequence selected from the group consisting of SEQ ID NOs: 907 to 1602, and has a length within ±4% of the length of the any one base sequence selected,
[0360] (b-13) a base sequence that has at least 97% identity with any one base sequence selected from the group consisting of SEQ ID NOs: 907 to 1602, and has a length within ±3% of the length of the any one base sequence selected,
[0361] (b-14) a base sequence that has at least 98% identity with any one base sequence selected from the group consisting of SEQ ID NOs: 907 to 1602, and has a length within ±2% of the length of the any one base sequence selected,
[0362] (b-15) a base sequence that has at least 99% identity with any one base sequence selected from the group consisting of SEQ ID NOs: 907 to 1602, and has a length within ±1% of the length of the any one base sequence selected, and
[0363] (b-16) a base sequence that has at least 99.5% identity with any one base sequence selected from the group consisting of SEQ ID NOs: 907 to 1602, and has a length within ±0.5% of the length of the any one base sequence selected.

[0364] In one embodiment, the first unit oligomer comprises or consists of any one base sequence selected from the group consisting of SEQ ID NOs: 907 to 1602.

[0365] In one embodiment, the first unit oligomer comprises or consists of any one base sequence selected from the group consisting of SEQ ID NOs: 1180, 1190, 1201, 1212, 1222, 1224, and 1239.

[0366] Table 5 below shows examples of the target sequence of the second unit oligomer, and a complementary sequence (antisense sequence) thereof.

TABLE 5

| | | | SEQ | Antisense | SEQ |
|---|---|---|---|---|---|
| Length | | Target | ID | sequence | ID |
| mer | Target site | sequence | NO: | (5′ to 3′) | NO: |
| 1 | H45_(−61) | C | 1 | G | 106 |
| 1 | H45_(−62) | T | 2 | A | 107 |
| 1 | H45_(−63) | A | 3 | T | 108 |
| 1 | H45_(−64) | A | 4 | T | 109 |
| 1 | H45_(−65) | T | 5 | A | 110 |
| 1 | H45_(−66) | T | 6 | A | 111 |
| 2 | H45_(−61)-(−60) | CT | 7 | AG | 112 |
| 2 | H45_(−62)-(−61) | TC | 8 | GA | 113 |
| 2 | H45_(−63)-(−62) | AT | 9 | AT | 114 |
| 2 | H45_(−64)-(−63) | AA | 10 | TT | 115 |
| 2 | H45_(−65)-(−64) | TA | 11 | TA | 116 |
| 2 | H45_(−66)-(−65) | TT | 12 | AA | 117 |
| 2 | H45_(−67)-(−66) | TT | 13 | AA | 118 |
| 3 | H45_(−61)-(−59) | CTT | 14 | AAG | 119 |
| 3 | H45_(−62)-(−60) | TCT | 15 | AGA | 120 |
| 3 | H45_(−63)-(−61) | ATC | 16 | GAT | 121 |
| 3 | H45_(−64)-(−62) | AAT | 17 | ATT | 122 |
| 3 | H45_(−65)-(−63) | TAA | 18 | TTA | 123 |
| 3 | H45_(−66)-(−64) | TTA | 19 | TAA | 124 |
| 3 | H45_(−67)-(−65) | TTT | 20 | AAA | 125 |
| 3 | H45_(−68)-(−66) | GTT | 21 | AAC | 126 |
| 4 | H45_(−61)-(−58) | CTTT | 22 | AAAG | 127 |
| 4 | H45_(−62)-(−59) | TCTT | 23 | AAGA | 128 |
| 4 | H45_(−63)-(−60) | ATCT | 24 | AGAT | 129 |
| 4 | H45_(−64)-(−61) | AATC | 25 | GATT | 130 |
| 4 | H45_(−65)-(−62) | TAAT | 26 | ATTA | 131 |
| 4 | H45_(−66)-(−63) | TTAA | 27 | TTAA | 132 |
| 4 | H45_(−67)-(−64) | TTTA | 28 | TAAA | 133 |
| 4 | H45_(−68)-(−65) | GTTT | 29 | AAAC | 134 |
| 4 | H45_(−69)-(−66) | TGTT | 30 | AACA | 135 |
| 5 | H45_(−61)-(−57) | CTTTT | 31 | AAAAG | 136 |
| 5 | H45_(−62)-(−58) | TCTTT | 32 | AAAGA | 137 |
| 5 | H45_(−63)-(−59) | ATCTT | 33 | AAGAT | 138 |
| 5 | H45_(−64)-(−60) | AATCT | 34 | AGATT | 139 |
| 5 | H45_(−65)-(−61) | TAATC | 35 | GATTA | 140 |
| 5 | H45_(−66)-(−62) | TTAAT | 36 | ATTAA | 141 |
| 5 | H45_(−67)-(−63) | TTTAA | 37 | TTAAA | 142 |
| 5 | H45_(−68)-(−64) | GTTTA | 38 | TAAAC | 143 |
| 5 | H45_(−69)-(−65) | TGTTT | 39 | AAACA | 144 |
| 5 | H45_(−70)-(−66) | CTGTT | 40 | AACAG | 145 |
| 6 | H45_(−61)-(−56) | CTTTTC | 41 | GAAAAG | 146 |
| 6 | H45_(−62)-(−57) | TCTTTT | 42 | AAAAGA | 147 |
| 6 | H45_(−63)-(−58) | ATCTTT | 43 | AAAGAT | 148 |
| 6 | H45_(−64)-(−59) | AATCTT | 44 | AAGATT | 149 |
| 6 | H45_(−65)-(−60) | TAATCT | 45 | AGATTA | 150 |
| 6 | H45_(−66)-(−61) | TTAATC | 46 | GATTAA | 151 |
| 6 | H45_(−67)-(−62) | TTTAAT | 47 | ATTAAA | 152 |
| 6 | H45_(−68)-(−63) | GTTTAA | 48 | TTAAAC | 153 |
| 6 | H45_(−69)-(−64) | TGTTTA | 49 | TAAACA | 154 |
| 6 | H45_(−70)-(−65) | CTGTTT | 50 | AAACAG | 155 |
| 6 | H45_(−71)-(−66) | ACTGTT | 51 | AACAGT | 156 |
| 7 | H45_(−61)-(−55) | CTTTTCT | 52 | AGAAAAG | 157 |
| 7 | H45_(−62)-(−56) | TCTTTTC | 53 | GAAAAGA | 158 |
| 7 | H45_(−63)-(−57) | ATCTTTT | 54 | AAAAGAT | 159 |
| 7 | H45_(−64)-(−58) | AATCTTT | 55 | AAAGATT | 160 |
| 7 | H45_(−65)-(−59) | TAATCTT | 56 | AAGATTA | 161 |
| 7 | H45_(−66)-(−60) | TTAATCT | 57 | AGATTAA | 162 |
| 7 | H45_(−67)-(−61) | TTTAATC | 58 | GATTAAA | 163 |
| 7 | H45_(−68)-(−62) | GTTTAAT | 59 | ATTAAAC | 164 |
| 7 | H45_(−69)-(−63) | TGTTTAA | 60 | TTAAACA | 165 |
| 7 | H45_(−70)-(−64) | CTGTTTA | 61 | TAAACAG | 166 |
| 7 | H45_(−71)-(−65) | ACTGTTT | 62 | AAACAGT | 167 |
| 7 | H45_(−72)-(−66) | CACTGTT | 63 | AACAGTG | 168 |
| 8 | H45_(−61)-(−54) | CTTTTCTC | 64 | GAGAAAAG | 169 |
| 8 | H45_(−62)-(−55) | TCTTTTCT | 65 | AGAAAAGA | 170 |
| 8 | H45_(−63)-(−56) | ATCTTTTC | 66 | GAAAAGAT | 171 |
| 8 | H45_(−64)-(−57) | AATCTTTT | 67 | AAAAGATT | 172 |
| 8 | H45_(−65)-(−58) | TAATCTTT | 68 | AAAGATTA | 173 |
| 8 | H45_(−66)-(−59) | TTAATCTT | 69 | AAGATTAA | 174 |
| 8 | H45_(−67)-(−60) | TTTAATCT | 70 | AGATTAAA | 175 |
| 8 | H45_(−68)-(−61) | GTTTAATC | 71 | GATTAAAC | 176 |
| 8 | H45_(−69)-(−62) | TGTTTAAT | 72 | ATTAAACA | 177 |
| 8 | H45_(−70)-(−63) | CTGTTTAA | 73 | TTAAACAG | 178 |
| 8 | H45_(−71)-(−64) | ACTGTTTA | 74 | TAAACAGT | 179 |
| 8 | H45_(−72)-(−65) | CACTGTTT | 75 | AAACAGTG | 180 |
| 8 | H45_(−73)-(−66) | ACACTGTT | 76 | AACAGTGT | 181 |
| 9 | H45_(−61)-(−53) | CTTTTCTCA | 77 | TGAGAAAAG | 182 |
| 9 | H45_(−62)-(−54) | TCTTTTCTC | 78 | GAGAAAAGA | 183 |
| 9 | H45_(−63)-(−55) | ATCTTTTCT | 79 | AGAAAAGAT | 184 |
| 9 | H45_(−64)-(−56) | AATCTTTTC | 80 | GAAAAGATT | 185 |
| 9 | H45_(−65)-(−57) | TAATCTTTT | 81 | AAAAGATTA | 186 |
| 9 | H45_(−66)-(−58) | TTAATCTTT | 82 | AAAGATTAA | 187 |
| 9 | H45_(−67)-(−59) | TTTAATCTT | 83 | AAGATTAAA | 188 |
| 9 | H45_(−68)-(−60) | GTTTAATCT | 84 | AGATTAAAC | 189 |
| 9 | H45_(−69)-(−61) | TGTTTAATC | 85 | GATTAAACA | 190 |
| 9 | H45_(−70)-(−62) | CTGTTTAAT | 86 | ATTAAACAG | 191 |
| 9 | H45_(−71)-(−63) | ACTGTTTAA | 87 | TTAAACAGT | 192 |
| 9 | H45_(−72)-(−64) | CACTGTTTA | 88 | TAAACAGTG | 193 |
| 9 | H45_(−73)-(−65) | ACACTGTTT | 89 | AAACAGTGT | 194 |
| 9 | H45_(−74)-(−66) | CACACTGTT | 90 | AACAGTGTG | 195 |
| 10 | H45_(−61)-(−52) | CTTTTCTCAA | 91 | TTGAGAAAAG | 196 |
| 10 | H45_(−62)-(−53) | TCTTTTCTCA | 92 | TGAGAAAAGA | 197 |
| 10 | H45_(−63)-(−54) | ATCTTTTCTC | 93 | GAGAAAAGAT | 198 |
| 10 | H45_(−64)-(−55) | AATCTTTTCT | 94 | AGAAAAGATT | 199 |
| 10 | H45_(−65)-(−56) | TAATCTTTTC | 95 | GAAAAGATTA | 200 |
| 10 | H45_(−66)-(−57) | TTAATCTTTT | 96 | AAAAGATTAA | 201 |
| 10 | H45_(−67)-(−58) | TTTAATCTTT | 97 | AAAGATTAAA | 202 |
| 10 | H45_(−68)-(−59) | GTTTAATCTT | 98 | AAGATTAAAC | 203 |
| 10 | H45_(−69)-(−60) | TGTTTAATCT | 99 | AGATTAAACA | 204 |
| 10 | H45_(−70)-(−61) | CTGTTTAATC | 100 | GATTAAACAG | 205 |
| 10 | H45_(−71)-(−62) | ACTGTTTAAT | 101 | ATTAAACAGT | 206 |
| 10 | H45_(−72)-(−63) | CACTGTTTAA | 102 | TTAAACAGTG | 207 |
| 10 | H45_(−73)-(−64) | ACACTGTTTA | 103 | TAAACAGTGT | 208 |
| 10 | H45_(−74)-(−65) | CACACTGTTT | 104 | AAACAGTGTG | 209 |
| 10 | H45_(−75)-(−66) | GCACACTGTT | 105 | AACAGTGTGC | 210 |

[0367] In one embodiment, the second unit oligomer comprises a base sequence complementary to:
[0368] (a) any one base sequence selected from the group consisting of SEQ ID NOs: 1 to 105;
[0369] (b) a base sequence that hybridizes under stringent conditions to a base sequence complementary to any one base sequence selected from the group consisting of SEQ ID NOS: 1 to 105;
[0370] (c) a base sequence that has at least 85% identity with any one base sequence selected from the group consisting of SEQ ID NOs: 1 to 105, and has a length within ±15% of the length of the any one base sequence selected; or
[0371] (d) a partial base sequence of any one base sequence selected from the group consisting of the base sequences (a), (b), and (c).

[0372] Herein, the base sequence (c) is a mutant type of the base sequence (a), and examples of such a mutant type also include:
[0373] (c-1) a base sequence that has at least 85% identity with any one base sequence selected from the group consisting of SEQ ID NOS: 1 to 105, and has a length within ±15% of the length of the any one base sequence selected,
[0374] (c-2) a base sequence that has at least 86% identity with any one base sequence selected from the group consisting of SEQ ID NOs: 1 to 105, and has a length within ±14% of the length of the any one base sequence selected,
[0375] (c-3) a base sequence that has at least 87% identity with any one base sequence selected from the group consisting of SEQ ID NOs: 1 to 105, and has a length within #13% of the length of the any one base sequence selected,
[0376] (c-4) a base sequence that has at least 88% identity with any one base sequence selected from the group consisting of SEQ ID NOs: 1 to 105, and has a length within ±12% of the length of the any one base sequence selected,
[0377] (c-5) a base sequence that has at least 89% identity with any one base sequence selected from the group consisting of SEQ ID NOs: 1 to 105, and has a length within ±11% of the length of the any one base sequence selected,
[0378] (c-6) a base sequence that has at least 90% identity with any one base sequence selected from the group consisting of SEQ ID NOS: 1 to 105, and has a length within ±10% of the length of the any one base sequence selected,
[0379] (c-7) a base sequence that has at least 91% identity with any one base sequence selected from the group consisting of SEQ ID NOs: 1 to 105, and has a length within ±9% of the length of the any one base sequence selected,
[0380] (c-8) a base sequence that has at least 92% identity with any one base sequence selected from the group consisting of SEQ ID NOs: 1 to 105, and has a length within #8% of the length of the any one base sequence selected,
[0381] (c-9) a base sequence that has at least 93% identity with any one base sequence selected from the group consisting of SEQ ID NOs: 1 to 105, and has a length within ±7% of the length of the any one base sequence selected,
[0382] (c-10) a base sequence that has at least 94% identity with any one base sequence selected from the group consisting of SEQ ID NOS: 1 to 105, and has a length within ±6% of the length of the any one base sequence selected,
[0383] (c-11) a base sequence that has at least 95% identity with any one base sequence selected from the group consisting of SEQ ID NOs: 1 to 105, and has a length within ±5% of the length of the any one base sequence selected,
[0384] (c-12) a base sequence that has at least 96% identity with any one base sequence selected from the group consisting of SEQ ID NOS: 1 to 105, and has a length within ±4% of the length of the any one base sequence selected,
[0385] (c-13) a base sequence that has at least 97% identity with any one base sequence selected from the group consisting of SEQ ID NOs: 1 to 105, and has a length within ±3% of the length of the any one base sequence selected,
[0386] (c-14) a base sequence that has at least 98% identity with any one base sequence selected from the group consisting of SEQ ID NOS: 1 to 105, and has a length within ±2% of the length of the any one base sequence selected,
[0387] (c-15) a base sequence that has at least 99% identity with any one base sequence selected from the group consisting of SEQ ID NOs: 1 to 105, and has a length within ±1% of the length of the any one base sequence selected, and
[0388] (c-16) a base sequence that has at least 99.5% identity with any one base sequence selected from the group consisting of SEQ ID NOS: 1 to 105, and has a length within ±0.5% of the length of the any one base sequence selected.

[0389] In one embodiment, the second unit oligomer comprises or consists of:
[0390] (a) any one base sequence selected from the group consisting of SEQ ID NOS: 106 to 210; or
[0391] (b) a base sequence that has at least 85% identity with any one base sequence selected from the group consisting of SEQ ID NOs: 106 to 210, and has a length within ±15% of the length of the any one base sequence selected.

[0392] Herein, the base sequence (b) is a mutant type of the base sequence (a), and examples of such a mutant type also include
[0393] (b-1) a base sequence that has at least 85% identity with any one base sequence selected from the group consisting of SEQ ID NOs: 106 to 210, and has a length within ±15% of the length of the any one base sequence selected,
[0394] (b-2) a base sequence that has at least 86% identity with any one base sequence selected from the group consisting of SEQ ID NOs: 106 to 210, and has a length within ±14% of the length of the any one base sequence selected,
[0395] (b-3) a base sequence that has at least 87% identity with any one base sequence selected from the group consisting of SEQ ID NOs: 106 to 210, and has a length within ±13% of the length of the any one base sequence selected,
[0396] (b-4) a base sequence that has at least 88% identity with any one base sequence selected from the group consisting of SEQ ID NOS: 106 to 210, and has a length within ±12% of the length of the any one base sequence selected,
[0397] (b-5) a base sequence that has at least 89% identity with any one base sequence selected from the group consisting of SEQ ID NOs: 106 to 210, and has a length within ±11% of the length of the any one base sequence selected,
[0398] (b-6) a base sequence that has at least 90% identity with any one base sequence selected from the group consisting of SEQ ID NOS: 106 to 210, and has a length within ±10% of the length of the any one base sequence selected,
[0399] (b-7) a base sequence that has at least 91% identity with any one base sequence selected from the group consisting of SEQ ID NOS: 106 to 210, and has a length within ±9% of the length of the any one base sequence selected,
[0400] (b-8) a base sequence that has at least 92% identity with any one base sequence selected from the group consisting of SEQ ID NOS: 106 to 210, and has a length within ±8% of the length of the any one base sequence selected,
[0401] (b-9) a base sequence that has at least 93% identity with any one base sequence selected from the group consisting of SEQ ID NOS: 106 to 210, and has a length within ±7% of the length of the any one base sequence selected,
[0402] (b-10) a base sequence that has at least 94% identity with any one base sequence selected from the group consisting of SEQ ID NOS: 106 to 210, and has a length within ±6% of the length of the any one base sequence selected,
[0403] (b-11) a base sequence that has at least 95% identity with any one base sequence selected from the group consisting of SEQ ID NOs: 106 to 210, and has a length within ±5% of the length of the any one base sequence selected,
[0404] (b-12) a base sequence that has at least 96% identity with any one base sequence selected from the group consisting of SEQ ID NOs: 106 to 210, and has a length within ±4% of the length of the any one base sequence selected,
[0405] (b-13) a base sequence that has at least 97% identity with any one base sequence selected from the group consisting of SEQ ID NOs: 106 to 210, and has a length within ±3% of the length of the any one base sequence selected,
[0406] (b-14) a base sequence that has at least 98% identity with any one base sequence selected from the group consisting of SEQ ID NOs: 106 to 210, and has a length within ±2% of the length of the any one base sequence selected,
[0407] (b-15) a base sequence that has at least 99% identity with any one base sequence selected from the group consisting of SEQ ID NOs: 106 to 210, and has a length within ±1% of the length of the any one base sequence selected, and
[0408] (b-16) a base sequence that has at least 99.5% identity with any one base sequence selected from the group consisting of SEQ ID NOS: 106 to 210, and has a length within ±0.5% of the length of the any one base sequence selected.

[0409] In one embodiment, the second unit oligomer comprises or consists of any one base sequence selected from the group consisting of SEQ ID NOS: 106 to 210.

[0410] In one embodiment, the second unit oligomer comprises or consists of any one base sequence selected from the group consisting of SEQ ID NOS: 114, 124, 151, 201, 203, and 205.

[0411] In one embodiment, the first unit oligomer comprises or consists of any one base sequence selected from the group consisting of SEQ ID NOS: 907 to 1602, the second unit oligomer comprises or consists of any one base sequence selected from the group consisting of SEQ ID NOs: 106 to 210, and the first antisense oligomer comprises the first unit oligomer and the second unit oligomer from the 5′ ends in this order.

[0412] In one embodiment, the first antisense oligomer comprises the first unit oligomer and the second unit oligomer from the 5′ ends in this order, and
[0413] the first unit oligomer comprises or consists of a base sequence of SEQ ID NO: 1201, and the second unit oligomer comprises or consists of a base sequence of SEQ ID NO: 151,
[0414] the first unit oligomer comprises or consists of a base sequence of SEQ ID NO: 1201, and the second unit oligomer comprises or consists of a base sequence of SEQ ID NO: 201,
[0415] the first unit oligomer comprises or consists of a base sequence of SEQ ID NO: 1201, and the second unit oligomer comprises or consists of a base sequence of SEQ ID NO: 203,
[0416] the first unit oligomer comprises or consists of a base sequence of SEQ ID NO: 1201, and the second unit oligomer comprises or consists of a base sequence of SEQ ID NO: 205,
[0417] the first unit oligomer comprises or consists of a base sequence of SEQ ID NO: 1239, and the second unit oligomer comprises or consists of a base sequence of SEQ ID NO: 114,
[0418] the first unit oligomer comprises or consists of a base sequence of SEQ ID NO: 1224, and the second unit oligomer comprises or consists of a base sequence of SEQ ID NO: 124,
[0419] the first unit oligomer comprises or consists of a base sequence of SEQ ID NO: 1180, and the second unit oligomer comprises or consists of a base sequence of SEQ ID NO: 151,
[0420] the first unit oligomer comprises or consists of a base sequence of SEQ ID NO: 1190, and the second unit oligomer comprises or consists of a base sequence of SEQ ID NO: 151,
[0421] the first unit oligomer comprises or consists of a base sequence of SEQ ID NO: 1212, and the second unit oligomer comprises or consists of a base sequence of SEQ ID NO: 151, or
[0422] the first unit oligomer comprises or consists of a base sequence of SEQ ID NO: 1222, and the second unit oligomer comprises or consists of a base sequence of SEQ ID NO: 151.

[0423] Table 6 below shows examples of the target sequence of the second antisense oligomer of the present invention, and a complementary sequence (antisense sequence) thereof.

TABLE 6

| Length | | | SEQ | Antisense sequence | SEQ |
|---|---|---|---|---|---|
| mer | Target site | Target sequence | ID NO: | (5′ to 3′) | ID NO: |
| 15 | H55_(−18)- | ACATTTGGTCCTTTG | 3507 | CAAAGGACCAAATGT | 4299 |
| | (−4) | | | | |
| 15 | H55_(−17)- | CATTTGGTCCTTTGC | 3508 | GCAAAGGACCAAATG | 4300 |
| | (−3) | | | | |
| 15 | H55_(−16)- | ATTTGGTCCTTTGCA | 3509 | TGCAAAGGACCAAAT | 4301 |
| | (−2) | | | | |
| 15 | H55_(−15)- | TTTGGTCCTTTGCAG | 3510 | CTGCAAAGGACCAAA | 4302 |
| | (−1) | | | | |
| 15 | H55_(−14)- | TTGGTCCTTTGCAGG | 3511 | CCTGCAAAGGACCAA | 4303 |
| | 1 | | | | |
| 15 | H55_(−13)- | TGGTCCTTTGCAGGG | 3512 | CCCTGCAAAGGACCA | 4304 |
| | 2 | | | | |
| 15 | H55_(−12)- | GGTCCTTTGCAGGGT | 3513 | ACCCTGCAAAGGACC | 4305 |
| | 3 | | | | |
| 15 | H55_(−11)- | GTCCTTTGCAGGGTG | 3514 | CACCCTGCAAAGGAC | 4306 |
| | 4 | | | | |
| 15 | H55_(−10)- | TCCTTTGCAGGGTGA | 3515 | TCACCCTGCAAAGGA | 4307 |
| | 5 | | | | |
| 15 | H55_(−9)- | CCTTTGCAGGGTGAG | 3516 | CTCACCCTGCAAAGG | 4308 |
| | 6 | | | | |
| 15 | H55_(−8)- | CTTTGCAGGGTGAGT | 3517 | ACTCACCCTGCAAAG | 4309 |
| | 7 | | | | |
| 15 | H55_(−7)- | TTTGCAGGGTGAGTG | 3518 | CACTCACCCTGCAAA | 4310 |
| | 8 | | | | |
| 15 | H55_(−6)- | TTGCAGGGTGAGTGA | 3519 | TCACTCACCCTGCAA | 4311 |
| | 9 | | | | |
| 15 | H55_(−5)- | TGCAGGGTGAGTGAG | 3520 | CTCACTCACCCTGCA | 4312 |
| | 10 | | | | |
| 15 | H55_(−4)- | GCAGGGTGAGTGAGC | 3521 | GCTCACTCACCCTGC | 4313 |
| | 11 | | | | |
| 15 | H55_(−3)- | CAGGGTGAGTGAGCG | 3522 | CGCTCACTCACCCTG | 4314 |
| | 12 | | | | |
| 15 | H55_(−2)- | AGGGTGAGTGAGCGA | 3523 | TCGCTCACTCACCCT | 4315 |
| | 13 | | | | |
| 15 | H55_(−1)- | GGGTGAGTGAGCGAG | 3524 | CTCGCTCACTCACCC | 4316 |
| | 14 | | | | |
| 15 | H55_1-15 | GGTGAGTGAGCGAGA | 3525 | TCTCGCTCACTCACC | 4317 |
| 15 | H55_2-16 | GTGAGTGAGCGAGAG | 3526 | CTCTCGCTCACTCAC | 4318 |
| 15 | H55_3-17 | TGAGTGAGCGAGAGG | 3527 | CCTCTCGCTCACTCA | 4319 |
| 15 | H55_4-18 | GAGTGAGCGAGAGGC | 3528 | GCCTCTCGCTCACTC | 4320 |
| 15 | H55_5-19 | AGTGAGCGAGAGGCT | 3529 | AGCCTCTCGCTCACT | 4321 |
| 15 | H55_6-20 | GTGAGCGAGAGGCTG | 3530 | CAGCCTCTCGCTCAC | 4322 |
| 15 | H55_7-21 | TGAGCGAGAGGCTGC | 3531 | GCAGCCTCTCGCTCA | 4323 |
| 15 | H55_8-22 | GAGCGAGAGGCTGCT | 3532 | AGCAGCCTCTCGCTC | 4324 |
| 15 | H55_9-23 | AGCGAGAGGCTGCTT | 3533 | AAGCAGCCTCTCGCT | 4325 |
| 15 | H55_10-24 | GCGAGAGGCTGCTTT | 3534 | AAAGCAGCCTCTCGC | 4326 |
| 15 | H55_11-25 | CGAGAGGCTGCTTTG | 3535 | CAAAGCAGCCTCTCG | 4327 |
| 15 | H55_12-26 | GAGAGGCTGCTTTGG | 3536 | CCAAAGCAGCCTCTC | 4328 |
| 15 | H55_13-27 | AGAGGCTGCTTTGGA | 3537 | TCCAAAGCAGCCTCT | 4329 |
| 15 | H55_14-28 | GAGGCTGCTTTGGAA | 3538 | TTCCAAAGCAGCCTC | 4330 |
| 15 | H55_15-29 | AGGCTGCTTTGGAAG | 3539 | CTTCCAAAGCAGCCT | 4331 |
| 15 | H55_16-30 | GGCTGCTTTGGAAGA | 3540 | TCTTCCAAAGCAGCC | 4332 |
| 15 | H55_17-31 | GCTGCTTTGGAAGAA | 3541 | TTCTTCCAAAGCAGC | 4333 |
| 15 | H55_18-32 | CTGCTTTGGAAGAAA | 3542 | TTTCTTCCAAAGCAG | 4334 |
| 15 | H55_19-33 | TGCTTTGGAAGAAAC | 3543 | GTTTCTTCCAAAGCA | 4335 |
| 15 | H55_20-34 | GCTTTGGAAGAAACT | 3544 | AGTTTCTTCCAAAGC | 4336 |
| 15 | H55_21-35 | CTTTGGAAGAAACTC | 3545 | GAGTTTCTTCCAAAG | 4337 |
| 15 | H55_22-36 | TTTGGAAGAAACTCA | 3546 | TGAGTTTCTTCCAAA | 4338 |
| 15 | H55_23-37 | TTGGAAGAAACTCAT | 3547 | ATGAGTTTCTTCCAA | 4339 |
| 15 | H55_24-38 | TGGAAGAAACTCATA | 3548 | TATGAGTTTCTTCCA | 4340 |
| 16 | H55_(−19)- | AACATTTGGTCCTTTG | 3549 | CAAAGGACCAAATGTT | 4341 |
| | (−4) | | | | |
| 16 | H55_(−18)- | ACATTTGGTCCTTTGC | 3550 | GCAAAGGACCAAATGT | 4342 |
| | (−3) | | | | |
| 16 | H55_(−17)- | CATTTGGTCCTTTGCA | 3551 | TGCAAAGGACCAAATG | 4343 |
| | (−2) | | | | |
| 16 | H55_(−16)- | ATTTGGTCCTTTGCAG | 3552 | CTGCAAAGGACCAAAT | 4344 |
| | (−1) | | | | |
| 16 | H55_(−15)- | TTTGGTCCTTTGCAGG | 3553 | CCTGCAAAGGACCAAA | 4345 |
| | 1 | | | | |
| 16 | H55_(−14)- | TTGGTCCTTTGCAGGG | 3554 | CCCTGCAAAGGACCAA | 4346 |
| | 2 | | | | |
| 16 | H55_(−13)- | TGGTCCTTTGCAGGGT | 3555 | ACCCTGCAAAGGACCA | 4347 |
| | 3 | | | | |
| 16 | H55_(−12)- | GGTCCTTTGCAGGGTG | 3556 | CACCCTGCAAAGGACC | 4348 |
| | 4 | | | | |
| 16 | H55_(−11)- | GTCCTTTGCAGGGTGA | 3557 | TCACCCTGCAAAGGAC | 4349 |
| | 5 | | | | |
| 16 | H55_(−10)- | TCCTTTGCAGGGTGAG | 3558 | CTCACCCTGCAAAGGA | 4350 |
| | 6 | | | | |
| 16 | H55_(−9)- | CCTTTGCAGGGTGAGT | 3559 | ACTCACCCTGCAAAGG | 4351 |
| | 7 | | | | |
| 16 | H55_(−8)- | CTTTGCAGGGTGAGTG | 3560 | CACTCACCCTGCAAAG | 4352 |
| | 8 | | | | |
| 16 | H55_(−7)- | TTTGCAGGGTGAGTGA | 3561 | TCACTCACCCTGCAAA | 4353 |
| | 9 | | | | |
| 16 | H55_(−6)- | TTGCAGGGTGAGTGAG | 3562 | CTCACTCACCCTGCAA | 4354 |
| | 10 | | | | |
| 16 | H55_(−5)- | TGCAGGGTGAGTGAGC | 3563 | GCTCACTCACCCTGCA | 4355 |
| | 11 | | | | |
| 16 | H55_(−4)- | GCAGGGTGAGTGAGCG | 3564 | CGCTCACTCACCCTGC | 4356 |
| | 12 | | | | |
| 16 | H55_(−3)- | CAGGGTGAGTGAGCGA | 3565 | TCGCTCACTCACCCTG | 4357 |
| | 13 | | | | |
| 16 | H55_(−2)- | AGGGTGAGTGAGCGAG | 3566 | CTCGCTCACTCACCCT | 4358 |
| | 14 | | | | |
| 16 | H55_(−1)- | GGGTGAGTGAGCGAGA | 3567 | TCTCGCTCACTCACCC | 4359 |
| | 15 | | | | |
| 16 | H55_1-16 | GGTGAGTGAGCGAGAG | 3568 | CTCTCGCTCACTCACC | 4360 |
| 16 | H55_2-17 | GTGAGTGAGCGAGAGG | 3569 | CCTCTCGCTCACTCAC | 4361 |
| 16 | H55_3-18 | TGAGTGAGCGAGAGGC | 3570 | GCCTCTCGCTCACTCA | 4362 |
| 16 | H55_4-19 | GAGTGAGCGAGAGGCT | 3571 | AGCCTCTCGCTCACTC | 4363 |
| 16 | H55_5-20 | AGTGAGCGAGAGGCTG | 3572 | CAGCCTCTCGCTCACT | 4364 |
| 16 | H55_6-21 | GTGAGCGAGAGGCTGC | 3573 | GCAGCCTCTCGCTCAC | 4365 |
| 16 | H55_7-22 | TGAGCGAGAGGCTGCT | 3574 | AGCAGCCTCTCGCTCA | 4366 |
| 16 | H55_8-23 | GAGCGAGAGGCTGCTT | 3575 | AAGCAGCCTCTCGCTC | 4367 |
| 16 | H55_9-24 | AGCGAGAGGCTGCTTT | 3576 | AAAGCAGCCTCTCGCT | 4368 |
| 16 | H55_10-25 | GCGAGAGGCTGCTTTG | 3577 | CAAAGCAGCCTCTCGC | 4369 |
| 16 | H55_11-26 | CGAGAGGCTGCTTTGG | 3578 | CCAAAGCAGCCTCTCG | 4370 |
| 16 | H55_12-27 | GAGAGGCTGCTTTGGA | 3579 | TCCAAAGCAGCCTCTC | 4371 |
| 16 | H55_13-28 | AGAGGCTGCTTTGGAA | 3580 | TTCCAAAGCAGCCTCT | 4372 |
| 16 | H55_14-29 | GAGGCTGCTTTGGAAG | 3581 | CTTCCAAAGCAGCCTC | 4373 |
| 16 | H55_15-30 | AGGCTGCTTTGGAAGA | 3582 | TCTTCCAAAGCAGCCT | 4374 |
| 16 | H55_16-31 | GGCTGCTTTGGAAGAA | 3583 | TTCTTCCAAAGCAGCC | 4375 |
| 16 | H55_17-32 | GCTGCTTTGGAAGAAA | 3584 | TTTCTTCCAAAGCAGC | 4376 |
| 16 | H55_18-33 | CTGCTTTGGAAGAAAC | 3585 | GTTTCTTCCAAAGCAG | 4377 |
| 16 | H55_19-34 | TGCTTTGGAAGAAACT | 3586 | AGTTTCTTCCAAAGCA | 4378 |
| 16 | H55_20-35 | GCTTTGGAAGAAACTC | 3587 | GAGTTTCTTCCAAAGC | 4379 |
| 16 | H55_21-36 | CTTTGGAAGAAACTCA | 3588 | TGAGTTTCTTCCAAAG | 4380 |
| 16 | H55_22-37 | TTTGGAAGAAACTCAT | 3589 | ATGAGTTTCTTCCAAA | 4381 |
| 16 | H55_23-38 | TTGGAAGAAACTCATA | 3590 | TATGAGTTTCTTCCAA | 4382 |
| 16 | H55_24-39 | TGGAAGAAACTCATAG | 3591 | CTATGAGTTTCTTCCA | 4383 |
| 17 | H55_(−20)- | GAACATTTGGTCCTTTG | 3592 | CAAAGGACCAAATGTTC | 4384 |
| | (−4) | | | | |
| 17 | H55_(−19)- | AACATTTGGTCCTTTGC | 3593 | GCAAAGGACCAAATGTT | 4385 |
| | (−3) | | | | |
| 17 | H55_(−18)- | ACATTTGGTCCTTTGCA | 3594 | TGCAAAGGACCAAATGT | 4386 |
| | (−2) | | | | |
| 17 | H55_(−17)- | CATTTGGTCCTTTGCAG | 3595 | CTGCAAAGGACCAAATG | 4387 |
| | (−1) | | | | |
| 17 | H55_(−16)- | ATTTGGTCCTTTGCAGG | 3596 | CCTGCAAAGGACCAAAT | 4388 |
| | 1 | | | | |
| 17 | H55_(−15)- | TTTGGTCCTTTGCAGGG | 3597 | CCCTGCAAAGGACCAAA | 4389 |
| | 2 | | | | |
| 17 | H55_(−14)- | TTGGTCCTTTGCAGGGT | 3598 | ACCCTGCAAAGGACCAA | 4390 |
| | 3 | | | | |
| 17 | H55 (−13)- | TGGTCCTTTGCAGGGTG | 3599 | CACCCTGCAAAGGACCA | 4391 |
| | 4 | | | | |
| 17 | H55_(−12)- | GGTCCTTTGCAGGGTGA | 3600 | TCACCCTGCAAAGGACC | 4392 |
| | 5 | | | | |
| 17 | H55_(−11)- | GTCCTTTGCAGGGTGAG | 3601 | CTCACCCTGCAAAGGAC | 4393 |
| | 6 | | | | |
| 17 | H55_(−10)- | TCCTTTGCAGGGTGAGT | 3602 | ACTCACCCTGCAAAGGA | 4394 |
| | 7 | | | | |
| 17 | H55_(−9)- | CCTTTGCAGGGTGAGTG | 3603 | CACTCACCCTGCAAAGG | 4395 |
| | 8 | | | | |
| 17 | H55_(−8)- | CTTTGCAGGGTGAGTGA | 3604 | TCACTCACCCTGCAAAG | 4396 |
| | 9 | | | | |
| 17 | H55_(−7)- | TTTGCAGGGTGAGTGAG | 3605 | CTCACTCACCCTGCAAA | 4397 |
| | 10 | | | | |
| 17 | H55_(−6)- | TTGCAGGGTGAGTGAGC | 3606 | GCTCACTCACCCTGCAA | 4398 |
| | 11 | | | | |
| 17 | H55_(−5)- | TGCAGGGTGAGTGAGCG | 3607 | CGCTCACTCACCCTGCA | 4399 |
| | 12 | | | | |
| 17 | H55_(−4)- | GCAGGGTGAGTGAGCGA | 3608 | TCGCTCACTCACCCTGC | 4400 |
| | 13 | | | | |
| 17 | H55_(−3)- | CAGGGTGAGTGAGCGAG | 3609 | CTCGCTCACTCACCCTG | 4401 |
| | 14 | | | | |
| 17 | H55_(−2)- | AGGGTGAGTGAGCGAGA | 3610 | TCTCGCTCACTCACCCT | 4402 |
| | 15 | | | | |
| 17 | H55_(−1)- | GGGTGAGTGAGCGAGAG | 3611 | CTCTCGCTCACTCACCC | 4403 |
| | 16 | | | | |
| 17 | H55_1-17 | GGTGAGTGAGCGAGAGG | 3612 | CCTCTCGCTCACTCACC | 4404 |
| 17 | H55_2-18 | GTGAGTGAGCGAGAGGC | 3613 | GCCTCTCGCTCACTCAC | 4405 |
| 17 | H55_3-19 | TGAGTGAGCGAGAGGCT | 3614 | AGCCTCTCGCTCACTCA | 4406 |
| 17 | H55_4-20 | GAGTGAGCGAGAGGCTG | 3615 | CAGCCTCTCGCTCACTC | 4407 |
| 17 | H55_5-21 | AGTGAGCGAGAGGCTGC | 3616 | GCAGCCTCTCGCTCACT | 4408 |
| 17 | H55_6-22 | GTGAGCGAGAGGCTGCT | 3617 | AGCAGCCTCTCGCTCAC | 4409 |
| 17 | H55_7-23 | TGAGCGAGAGGCTGCTT | 3618 | AAGCAGCCTCTCGCTCA | 4410 |
| 17 | H55_8-24 | GAGCGAGAGGCTGCTTT | 3619 | AAAGCAGCCTCTCGCTC | 4411 |
| 17 | H55_9-25 | AGCGAGAGGCTGCTTTG | 3620 | CAAAGCAGCCTCTCGCT | 4412 |
| 17 | H55_10-26 | GCGAGAGGCTGCTTTGG | 3621 | CCAAAGCAGCCTCTCGC | 4413 |
| 17 | H55_11-27 | CGAGAGGCTGCTTTGGA | 3622 | TCCAAAGCAGCCTCTCG | 4414 |
| 17 | H55_12-28 | GAGAGGCTGCTTTGGAA | 3623 | TTCCAAAGCAGCCTCTC | 4415 |
| 17 | H55_13-29 | AGAGGCTGCTTTGGAAG | 3624 | CTTCCAAAGCAGCCTCT | 4416 |
| 17 | H55_14-30 | GAGGCTGCTTTGGAAGA | 3625 | TCTTCCAAAGCAGCCTC | 4417 |
| 17 | H55_15-31 | AGGCTGCTTTGGAAGAA | 3626 | TTCTTCCAAAGCAGCCT | 4418 |
| 17 | H55_16-32 | GGCTGCTTTGGAAGAAA | 3627 | TTTCTTCCAAAGCAGCC | 4419 |
| 17 | H55_17-33 | GCTGCTTTGGAAGAAAC | 3628 | GTTTCTTCCAAAGCAGC | 4420 |
| 17 | H55_18-34 | CTGCTTTGGAAGAAACT | 3629 | AGTTTCTTCCAAAGCAG | 4421 |
| 17 | H55_19-35 | TGCTTTGGAAGAAACTC | 3630 | GAGTTTCTTCCAAAGCA | 4422 |
| 17 | H55_20-36 | GCTTTGGAAGAAACTCA | 3631 | TGAGTTTCTTCCAAAGC | 4423 |
| 17 | H55_21-37 | CTTTGGAAGAAACTCAT | 3632 | ATGAGTTTCTTCCAAAG | 4424 |
| 17 | H55_22-38 | TTTGGAAGAAACTCATA | 3633 | TATGAGTTTCTTCCAAA | 4425 |
| 17 | H55_23-39 | TTGGAAGAAACTCATAG | 3634 | CTATGAGTTTCTTCCAA | 4426 |
| 17 | H55_24-40 | TGGAAGAAACTCATAGA | 3635 | TCTATGAGTTTCTTCCA | 4427 |
| 18 | H55_(−21)- | TGAACATTTGGTCCTTTG | 3636 | CAAAGGACCAAATGTTCA | 4428 |
| | (−4) | | | | |
| 18 | H55_(−20)- | GAACATTTGGTCCTTTGC | 3637 | GCAAAGGACCAAATGTTC | 4429 |
| | (−3) | | | | |
| 18 | H55_(−19)- | AACATTTGGTCCTTTGCA | 3638 | TGCAAAGGACCAAATGTT | 4430 |
| | (−2) | | | | |
| 18 | H55_(−18)- | ACATTTGGTCCTTTGCAG | 3639 | CTGCAAAGGACCAAATGT | 4431 |
| | (−1) | | | | |
| 18 | H55_(−17)- | CATTTGGTCCTTTGCAGG | 3640 | CCTGCAAAGGACCAAATG | 4432 |
| | 1 | | | | |
| 18 | H55_(−16)- | ATTTGGTCCTTTGCAGGG | 3641 | CCCTGCAAAGGACCAAAT | 4433 |
| | 2 | | | | |
| 18 | H55_(−15)- | TTTGGTCCTTTGCAGGGT | 3642 | ACCCTGCAAAGGACCAAA | 4434 |
| | 3 | | | | |
| 18 | H55_(−14)- | TTGGTCCTTTGCAGGGTG | 3643 | CACCCTGCAAAGGACCAA | 4435 |
| | 4 | | | | |
| 18 | H55_(−13)- | TGGTCCTTTGCAGGGTGA | 3644 | TCACCCTGCAAAGGACCA | 4436 |
| | 5 | | | | |
| 18 | H55_(−12)- | GGTCCTTTGCAGGGTGAG | 3645 | CTCACCCTGCAAAGGACC | 4437 |
| | 6 | | | | |
| 18 | H55_(−11)- | GTCCTTTGCAGGGTGAGT | 3646 | ACTCACCCTGCAAAGGAC | 4438 |
| | 7 | | | | |
| 18 | H55_(−10)- | TCCTTTGCAGGGTGAGTG | 3647 | CACTCACCCTGCAAAGGA | 4439 |
| | 8 | | | | |
| 18 | H55_(−9)- | CCTTTGCAGGGTGAGTGA | 3648 | TCACTCACCCTGCAAAGG | 4440 |
| | 9 | | | | |
| 18 | H55_(−8)- | CTTTGCAGGGTGAGTGAG | 3649 | CTCACTCACCCTGCAAAG | 4441 |
| | 10 | | | | |
| 18 | H55_(−7)- | TTTGCAGGGTGAGTGAGC | 3650 | GCTCACTCACCCTGCAAA | 4442 |
| | 11 | | | | |
| 18 | H55_(−6)- | TTGCAGGGTGAGTGAGCG | 3651 | CGCTCACTCACCCTGCAA | 4443 |
| | 12 | | | | |
| 18 | H55_(−5)- | TGCAGGGTGAGTGAGCGA | 3652 | TCGCTCACTCACCCTGCA | 4444 |
| | 13 | | | | |
| 18 | H55_(−4)- | GCAGGGTGAGTGAGCGAG | 3653 | CTCGCTCACTCACCCTGC | 4445 |
| | 14 | | | | |
| 18 | H55_(−3)- | CAGGGTGAGTGAGCGAGA | 3654 | TCTCGCTCACTCACCCTG | 4446 |
| | 15 | | | | |
| 18 | H55_(−2)- | AGGGTGAGTGAGCGAGAG | 3655 | CTCTCGCTCACTCACCCT | 1447 |
| | 16 | | | | |
| 18 | H55_(−1)- | GGGTGAGTGAGCGAGAGG | 3656 | CCTCTCGCTCACTCACCC | 4448 |
| | 17 | | | | |
| 18 | H55_1-18 | GGTGAGTGAGCGAGAGGC | 3657 | GCCTCTCGCTCACTCACC | 4449 |
| 18 | H55_2-19 | GTGAGTGAGCGAGAGGCT | 3658 | AGCCTCTCGCTCACTCAC | 4450 |
| 18 | H55_3-20 | TGAGTGAGCGAGAGGCTG | 3659 | CAGCCTCTCGCTCACTCA | 4451 |
| 18 | H55_4-21 | GAGTGAGCGAGAGGCTGC | 3660 | GCAGCCTCTCGCTCACTC | 4452 |
| 18 | H55_5-22 | AGTGAGCGAGAGGCTGCT | 3661 | AGCAGCCTCTCGCTCACT | 4453 |
| 18 | H55_6-23 | GTGAGCGAGAGGCTGCTT | 3662 | AAGCAGCCTCTCGCTCAC | 4454 |
| 18 | H55_7-24 | TGAGCGAGAGGCTGCTTT | 3663 | AAAGCAGCCTCTCGCTCA | 4455 |
| 18 | H55_8-25 | GAGCGAGAGGCTGCTTTG | 3664 | CAAAGCAGCCTCTCGCTC | 4456 |
| 18 | H55_9-26 | AGCGAGAGGCTGCTTTGG | 3665 | CCAAAGCAGCCTCTCGCT | 4457 |
| 18 | H55_10-27 | GCGAGAGGCTGCTTTGGA | 3666 | TCCAAAGCAGCCTCTCGC | 4458 |
| 18 | H55_11-28 | CGAGAGGCTGCTTTGGAA | 3667 | TTCCAAAGCAGCCTCTCG | 4459 |
| 18 | H55_12-29 | GAGAGGCTGCTTTGGAAG | 3668 | CTTCCAAAGCAGCCTCTC | 4460 |
| 18 | H55_13-30 | AGAGGCTGCTTTGGAAGA | 3669 | TCTTCCAAAGCAGCCTCT | 4461 |
| 18 | H55_14-31 | GAGGCTGCTTTGGAAGAA | 3670 | TTCTTCCAAAGCAGCCTC | 4462 |
| 18 | H55_15-32 | AGGCTGCTTTGGAAGAAA | 3671 | TTTCTTCCAAAGCAGCCT | 4463 |
| 18 | H55_16-33 | GGCTGCTTTGGAAGAAAC | 3672 | GTTTCTTCCAAAGCAGCC | 4464 |
| 18 | H55_17-34 | GCTGCTTTGGAAGAAACT | 3673 | AGTTTCTTCCAAAGCAGC | 4465 |
| 18 | H55_18-35 | CTGCTTTGGAAGAAACTC | 3674 | GAGTTTCTTCCAAAGCAG | 4466 |
| 18 | H55_19-36 | TGCTTTGGAAGAAACTCA | 3675 | TGAGTTTCTTCCAAAGCA | 4467 |
| 18 | H55_20-37 | GCTTTGGAAGAAACTCAT | 3676 | ATGAGTTTCTTCCAAAGC | 4468 |
| 18 | H55_21-38 | CTTTGGAAGAAACTCATA | 3677 | TATGAGTTTCTTCCAAAG | 4469 |
| 18 | H55_22-39 | TTTGGAAGAAACTCATAG | 3678 | CTATGAGTTTCTTCCAAA | 4470 |
| 18 | H55_23-40 | TTGGAAGAAACTCATAGA | 3679 | TCTATGAGTTTCTTCCAA | 4471 |
| 18 | H55_24-41 | TGGAAGAAACTCATAGAT | 3680 | ATCTATGAGTTTCTTCCA | 4472 |
| 19 | H55_(−22)- | CTGAACATTTGGTCCTTTG | 3681 | CAAAGGACCAAATGTTCAG | 4473 |
| | (−4) | | | | |
| 19 | H55_(−21)- | TGAACATTTGGTCCTTTGC | 3682 | GCAAAGGACCAAATGTTCA | 4474 |
| | (−3) | | | | |
| 19 | H55_(−20)- | GAACATTTGGTCCTTTGCA | 3683 | TGCAAAGGACCAAATGTTC | 4475 |
| | (−2) | | | | |
| 19 | H55_(−19)- | AACATTTGGTCCTTTGCAG | 3684 | CTGCAAAGGACCAAATGTT | 4476 |
| | (−1) | | | | |
| 19 | H55_(−18)- | ACATTTGGTCCTTTGCAGG | 3685 | CCTGCAAAGGACCAAATGT | 4477 |
| | 1 | | | | |
| 19 | H55_(−17)- | CATTTGGTCCTTTGCAGGG | 3686 | CCCTGCAAAGGACCAAATG | 4478 |
| | 2 | | | | |
| 19 | H55_(−16)- | ATTTGGTCCTTTGCAGGGT | 3687 | ACCCTGCAAAGGACCAAAT | 4479 |
| | 3 | | | | |
| 19 | H55_(−15)- | TTTGGTCCTTTGCAGGGTG | 3688 | CACCCTGCAAAGGACCAAA | 4480 |
| | 4 | | | | |
| 19 | H55_(−14)- | TTGGTCCTTTGCAGGGTGA | 3689 | TCACCCTGCAAAGGACCAA | 4481 |
| | 5 | | | | |
| 19 | H55_(−13)- | TGGTCCTTTGCAGGGTGAG | 3690 | CTCACCCTGCAAAGGACCA | 4482 |
| | 6 | | | | |
| 19 | H55_(−12)- | GGTCCTTTGCAGGGTGAGT | 3691 | ACTCACCCTGCAAAGGACC | 4483 |
| | 7 | | | | |
| 19 | H55_(−11)- | GTCCTTTGCAGGGTGAGTG | 3692 | CACTCACCCTGCAAAGGAC | 4484 |
| | 8 | | | | |
| 19 | H55_(−10)- | TCCTTTGCAGGGTGAGTGA | 3693 | TCACTCACCCTGCAAAGGA | 4485 |
| | 9 | | | | |
| 19 | H55_(−9)- | CCTTTGCAGGGTGAGTGAG | 3694 | CTCACTCACCCTGCAAAGG | 4486 |
| | 10 | | | | |
| 19 | H55_(−8)- | CTTTGCAGGGTGAGTGAGC | 3695 | GCTCACTCACCCTGCAAAG | 4487 |
| | 11 | | | | |
| 19 | H55_(−7)- | TTTGCAGGGTGAGTGAGCG | 3696 | CGCTCACTCACCCTGCAAA | 4488 |
| | 12 | | | | |
| 19 | HI55_(−6)- | TTGCAGGGTGAGTGAGCGA | 3697 | TCGCTCACTCACCCTGCAA | 4489 |
| | 13 | | | | |
| 19 | H55_(−5)- | TGCAGGGTGAGTGAGCGAG | 3698 | CTCGCTCACTCACCCTGCA | 4490 |
| | 14 | | | | |
| 19 | H55_(−4)- | GCAGGGTGAGTGAGCGAGA | 3699 | TCTCGCTCACTCACCCTGC | 4491 |
| | 15 | | | | |
| 19 | H55_(−3)- | CAGGGTGAGTGAGCGAGAG | 3700 | CTCTCGCTCACTCACCCTG | 4492 |
| | 16 | | | | |
| 19 | H55_(−2)- | AGGGTGAGTGAGCGAGAGG | 3701 | CCTCTCGCTCACTCACCCT | 4493 |
| | 17 | | | | |
| 19 | H55_(−1)- | GGGTGAGTGAGCGAGAGGC | 3702 | GCCTCTCGCTCACTCACCC | 4494 |
| | 18 | | | | |
| 19 | H55_1-19 | GGTGAGTGAGCGAGAGGCT | 3703 | AGCCTCTCGCTCACTCACC | 4495 |
| 19 | H55_2-20 | GTGAGTGAGCGAGAGGCTG | 3704 | CAGCCTCTCGCTCACTCAC | 4496 |
| 19 | H55_3-21 | TGAGTGAGCGAGAGGCTGC | 3705 | GCAGCCTCTCGCTCACTCA | 4497 |
| 19 | H55_4-22 | GAGTGAGCGAGAGGCTGCT | 3706 | AGCAGCCTCTCGCTCACTC | 4498 |
| 19 | H55_5-23 | AGTGAGCGAGAGGCTGCTT | 3707 | AAGCAGCCTCTCGCTCACT | 4499 |
| 19 | H55_6-24 | GTGAGCGAGAGGCTGCTTT | 3708 | AAAGCAGCCTCTCGCTCAC | 4500 |
| 19 | H55_7-25 | TGAGCGAGAGGCTGCTTTG | 3709 | CAAAGCAGCCTCTCGCTCA | 4501 |
| 19 | H55_8-26 | GAGCGAGAGGCTGCTTTGG | 3710 | CCAAAGCAGCCTCTCGCTC | 4502 |
| 19 | H55_9-27 | AGCGAGAGGCTGCTTTGGA | 3711 | TCCAAAGCAGCCTCTCGCT | 4503 |
| 19 | H55_10-28 | GCGAGAGGCTGCTTTGGAA | 3712 | TTCCAAAGCAGCCTCTCGC | 4504 |
| 19 | H55_11-29 | CGAGAGGCTGCTTTGGAAG | 3713 | CTTCCAAAGCAGCCTCTCG | 4505 |
| 19 | H55_12-30 | GAGAGGCTGCTTTGGAAGA | 3714 | TCTTCCAAAGCAGCCTCTC | 4506 |
| 19 | H55_13-31 | AGAGGCTGCTTTGGAAGAA | 3715 | TTCTTCCAAAGCAGCCTCT | 4507 |
| 19 | H55_14-32 | GAGGCTGCTTTGGAAGAAA | 3716 | TTTCTTCCAAAGCAGCCTC | 4508 |
| 19 | H55_15-33 | AGGCTGCTTTGGAAGAAAC | 3717 | GTTTCTTCCAAAGCAGCCT | 4509 |
| 19 | H55_16-34 | GGCTGCTTTGGAAGAAACT | 3718 | AGTTTCTTCCAAAGCAGCC | 4510 |
| 19 | H55_17-35 | GCTGCTTTGGAAGAAACTC | 3719 | GAGTTTCTTCCAAAGCAGC | 4511 |
| 19 | H55_18-36 | CTGCTTTGGAAGAAACTCA | 3720 | TGAGTTTCTTCCAAAGCAG | 4512 |
| 19 | H55_19-37 | TGCTTTGGAAGAAACTCAT | 3721 | ATGAGTTTCTTCCAAAGCA | 4513 |
| 19 | H55_20-38 | GCTTTGGAAGAAACTCATA | 3722 | TATGAGTTTCTTCCAAAGC | 4514 |
| 19 | H55_21-39 | CTTTGGAAGAAACTCATAG | 3723 | CTATGAGTTTCTTCCAAAG | 4515 |
| 19 | H55_22-40 | TTTGGAAGAAACTCATAGA | 3724 | TCTATGAGTTTCTTCCAAA | 4516 |
| 19 | H55_23-41 | TTGGAAGAAACTCATAGAT | 3725 | ATCTATGAGTTTCTTCCAA | 4517 |
| 19 | H55_24-42 | TGGAAGAAACTCATAGATT | 3726 | AATCTATGAGTTTCTTCCA | 4518 |
| 20 | H55_(−23)- | TCTGAACATTTGGTCCTTTG | 3727 | CAAAGGACCAAATGTTCAGA | 4519 |
| | (−4) | | | | |
| 20 | H55_(−22)- | CTGAACATTTGGTCCTTTGC | 3728 | GCAAAGGACCAAATGTTCAG | 4520 |
| | (−3) | | | | |
| 20 | H55_(−21)- | TGAACATTTGGTCCTTTGCA | 3729 | TGCAAAGGACCAAATGTTCA | 4521 |
| | (−2) | | | | |
| 20 | H55_(−20)- | GAACATTTGGTCCTTTGCAG | 3730 | CTGCAAAGGACCAAATGTTC | 4522 |
| | (−1) | | | | |
| 20 | H55_(−19)- | AACATTTGGTCCTTTGCAGG | 3731 | CCTGCAAAGGACCAAATGTT | 4523 |
| | 1 | | | | |
| 20 | H55_(−18)- | ACATTTGGTCCTTTGCAGGG | 3732 | CCCTGCAAAGGACCAAATGT | 4524 |
| | 2 | | | | |
| 20 | H55_(−17)- | CATTTGGTCCTTTGCAGGGT | 3733 | ACCCTGCAAAGGACCAAATG | 4525 |
| | 3 | | | | |
| 20 | H55_(−16)- | ATTTGGTCCTTTGCAGGGTG | 3734 | CACCCTGCAAAGGACCAAAT | 4526 |
| | 4 | | | | |
| 20 | H55_(−15)- | TTTGGTCCTTTGCAGGGTGA | 3735 | TCACCCTGCAAAGGACCAAA | 4527 |
| | 5 | | | | |
| 20 | H55_(−14)- | TTGGTCCTTTGCAGGGTGAG | 3736 | CTCACCCTGCAAAGGACCAA | 4528 |
| | 6 | | | | |
| 20 | H55_(−13)- | TGGTCCTTTGCAGGGTGAGT | 3737 | ACTCACCCTGCAAAGGACCA | 4529 |
| | 7 | | | | |
| 20 | H55_(−12)- | GGTCCTTTGCAGGGTGAGTG | 3738 | CACTCACCCTGCAAAGGACC | 4530 |
| | 8 | | | | |
| 20 | H55_(−11)- | GTCCTTTGCAGGGTGAGTGA | 3739 | TCACTCACCCTGCAAAGGAC | 4531 |
| | 9 | | | | |
| 20 | H55_(−10)- | TCCTTTGCAGGGTGAGTGAG | 3740 | CTCACTCACCCTGCAAAGGA | 4532 |
| | 10 | | | | |
| 20 | H55_(−9)- | CCTTTGCAGGGTGAGTGAGC | 3741 | GCTCACTCACCCTGCAAAGG | 4533 |
| | 11 | | | | |
| 20 | H55_(−8)- | CTTTGCAGGGTGAGTGAGCG | 3742 | CGCTCACTCACCCTGCAAAG | 4534 |
| | 12 | | | | |
| 20 | H55_(−7)- | TTTGCAGGGTGAGTGAGCGA | 3743 | TCGCTCACTCACCCTGCAAA | 4535 |
| | 13 | | | | |
| 20 | H55_(−6)- | TTGCAGGGTGAGTGAGCGAG | 3744 | CTCGCTCACTCACCCTGCAA | 4536 |
| | 14 | | | | |
| 20 | H55_(−5)- | TGCAGGGTGAGTGAGCGAGA | 3745 | TCTCGCTCACTCACCCTGCA | 4537 |
| | 15 | | | | |
| 20 | H55_(−4)- | GCAGGGTGAGTGAGCGAGAG | 3746 | CTCTCGCTCACTCACCCTGC | 4538 |
| | 16 | | | | |
| 20 | H55_(−3)- | CAGGGTGAGTGAGCGAGAGG | 3747 | CCTCTCGCTCACTCACCCTG | 4539 |
| | 17 | | | | |
| 20 | H55_(−2)- | AGGGTGAGTGAGCGAGAGGC | 3748 | GCCTCTCGCTCACTCACCCT | 4540 |
| | 18 | | | | |
| 20 | H55_(−1)- | GGGTGAGTGAGCGAGAGGCT | 3749 | AGCCTCTCGCTCACTCACCC | 4541 |
| | 19 | | | | |
| 20 | H55_1-20 | GGTGAGTGAGCGAGAGGCTG | 3750 | CAGCCTCTCGCTCACTCACC | 4542 |
| 20 | H55_2-21 | GTGAGTGAGCGAGAGGCTGC | 3751 | GCAGCCTCTCGCTCACTCAC | 4543 |
| 20 | H55_3-22 | TGAGTGAGCGAGAGGCTGCT | 3752 | AGCAGCCTCTCGCTCACTCA | 4544 |
| 20 | H55_4-23 | GAGTGAGCGAGAGGCTGCTT | 3753 | AAGCAGCCTCTCGCTCACTC | 4545 |
| 20 | H55_5-24 | AGTGAGCGAGAGGCTGCTTT | 3754 | AAAGCAGCCTCTCGCTCACT | 4546 |
| 20 | H55_6-25 | GTGAGCGAGAGGCTGCTTTG | 3755 | CAAAGCAGCCTCTCGCTCAC | 4547 |
| 20 | H55_7-26 | TGAGCGAGAGGCTGCTTTGG | 3756 | CCAAAGCAGCCTCTCGCTCA | 4548 |
| 20 | H55_8-27 | GAGCGAGAGGCTGCTTTGGA | 3757 | TCCAAAGCAGCCTCTCGCTC | 4549 |
| 20 | H55_9-28 | AGCGAGAGGCTGCTTTGGAA | 3758 | TTCCAAAGCAGCCTCTCGCT | 4550 |
| 20 | H55_10-29 | GCGAGAGGCTGCTTTGGAAG | 3759 | CTTCCAAAGCAGCCTCTCGC | 4551 |
| 20 | H55_11-30 | CGAGAGGCTGCTTTGGAAGA | 3760 | TCTTCCAAAGCAGCCTCTCG | 4552 |
| 20 | H55_12-31 | GAGAGGCTGCTTTGGAAGAA | 3761 | TTCTTCCAAAGCAGCCTCTC | 4553 |
| 20 | H55_13-32 | AGAGGCTGCTTTGGAAGAAA | 3762 | TTTCTTCCAAAGCAGCCTCT | 4554 |
| 20 | H55_14-33 | GAGGCTGCTTTGGAAGAAAC | 3763 | GTTTCTTCCAAAGCAGCCTC | 4555 |
| 20 | H55_15-34 | AGGCTGCTTTGGAAGAAACT | 3764 | AGTTTCTTCCAAAGCAGCCT | 4556 |
| 20 | H55_16-35 | GGCTGCTTTGGAAGAAACTC | 3765 | GAGTTTCTTCCAAAGCAGCC | 4557 |
| 20 | H55_17-36 | GCTGCTTTGGAAGAAACTCA | 3766 | TGAGTTTCTTCCAAAGCAGC | 4558 |
| 20 | H55_18-37 | CTGCTTTGGAAGAAACTCAT | 3767 | ATGAGTTTCTTCCAAAGCAG | 4559 |
| 20 | H55_19-38 | TGCTTTGGAAGAAACTCATA | 3768 | TATGAGTTTCTTCCAAAGCA | 4560 |
| 20 | H55_20-39 | GCTTTGGAAGAAACTCATAG | 3769 | CTATGAGTTTCTTCCAAAGC | 4561 |
| 20 | H55_21-40 | CTTTGGAAGAAACTCATAGA | 3770 | TCTATGAGTTTCTTCCAAAG | 4562 |
| 20 | H55_22-41 | TTTGGAAGAAACTCATAGAT | 3771 | ATCTATGAGTTTCTTCCAAA | 4563 |
| 20 | H55_23-42 | TTGGAAGAAACTCATAGATT | 3772 | AATCTATGAGTTTCTTCCAA | 4564 |
| 20 | H55_24-43 | TGGAAGAAACTCATAGATTA | 3773 | TAATCTATGAGTTTCTTCCA | 4565 |
| 21 | H55_(−24)- | ATCTGAACATTTGGTCCTTTG | 3774 | CAAAGGACCAAATGTTCAGAT | 4566 |
| | (−4) | | | | |
| 21 | H55_(−23)- | TCTGAACATTTGGTCCTTTGC | 3775 | GCAAAGGACCAAATGTTCAGA | 4567 |
| | (−3) | | | | |
| 21 | H55_(−22)- | CTGAACATTTGGTCCTTTGCA | 3776 | TGCAAAGGACCAAATGTTCAG | 4568 |
| | (−2) | | | | |
| 21 | H55_(−21)- | TGAACATTTGGTCCTTTGCAG | 3777 | CTGCAAAGGACCAAATGTTCA | 4569 |
| | (−1) | | | | |
| 21 | H55_(−20)- | GAACATTTGGTCCTTTGCAGG | 3778 | CCTGCAAAGGACCAAATGTTC | 4570 |
| | 1 | | | | |
| 21 | H55_(−19)- | AACATTTGGTCCTTTGCAGGG | 3779 | CCCTGCAAAGGACCAAATGTT | 4571 |
| | 2 | | | | |
| 21 | H55_(−18)- | ACATTTGGTCCTTTGCAGGGT | 3780 | ACCCTGCAAAGGACCAAATGT | 4572 |
| | 3 | | | | |
| 21 | H55_(−17)- | CATTTGGTCCTTTGCAGGGTG | 3781 | CACCCTGCAAAGGACCAAATG | 4573 |
| | 4 | | | | |
| 21 | H55_(−16)- | ATTTGGTCCTTTGCAGGGTGA | 3782 | TCACCCTGCAAAGGACCAAAT | 4574 |
| | 5 | | | | |
| 21 | H55_(−15)- | TTTGGTCCTTTGCAGGGTGAG | 3783 | CTCACCCTGCAAAGGACCAAA | 4575 |
| | 6 | | | | |
| 21 | H55_(−14)- | TTGGTCCTTTGCAGGGTGAGT | 3784 | ACTCACCCTGCAAAGGACCAA | 4576 |
| | 7 | | | | |
| 21 | H55_(−13)- | TGGTCCTTTGCAGGGTGAGTG | 3785 | CACTCACCCTGCAAAGGACCA | 4577 |
| | 8 | | | | |
| 21 | H55_(−12)- | GGTCCTTTGCAGGGTGAGTGA | 3786 | TCACTCACCCTGCAAAGGACC | 4578 |
| | 9 | | | | |
| 21 | H55_(−11)- | GTCCTTTGCAGGGTGAGTGAG | 3787 | CTCACTCACCCTGCAAAGGAC | 4579 |
| | 10 | | | | |
| 21 | H55_(−10)- | TCCTTTGCAGGGTGAGTGAGC | 3788 | GCTCACTCACCCTGCAAAGGA | 4580 |
| | 11 | | | | |
| 21 | H55_(−9)- | CCTTTGCAGGGTGAGTGAGCG | 3789 | CGCTCACTCACCCTGCAAAGG | 4581 |
| | 12 | | | | |
| 21 | H55_(−8)- | CTTTGCAGGGTGAGTGAGCGA | 3790 | TCGCTCACTCACCCTGCAAAG | 4582 |
| | 13 | | | | |
| 21 | H55_(−7)- | TTTGCAGGGTGAGTGAGCGAG | 3791 | CTCGCTCACTCACCCTGCAAA | 4583 |
| | 14 | | | | |
| 21 | H55_(−6)- | TTGCAGGGTGAGTGAGCGAGA | 3792 | TCTCGCTCACTCACCCTGCAA | 4584 |
| | 15 | | | | |
| 21 | H55_(−5)- | TGCAGGGTGAGTGAGCGAGAG | 3793 | CTCTCGCTCACTCACCCTGCA | 4585 |
| | 16 | | | | |
| 21 | H55_(−4)- | GCAGGGTGAGTGAGCGAGAGG | 3794 | CCTCTCGCTCACTCACCCTGC | 4586 |
| | 17 | | | | |
| 21 | H55_(−3)- | CAGGGTGAGTGAGCGAGAGGC | 3795 | GCCTCTCGCTCACTCACCCTG | 4587 |
| | 18 | | | | |
| 21 | H55_(−2)- | AGGGTGAGTGAGCGAGAGGCT | 3796 | AGCCTCTCGCTCACTCACCCT | 4588 |
| | 19 | | | | |
| 21 | H55_(−1)- | GGGTGAGTGAGCGAGAGGCTG | 3797 | CAGCCTCTCGCTCACTCACCC | 4589 |
| | 20 | | | | |
| 21 | H55_1-21 | GGTGAGTGAGCGAGAGGCTGC | 3798 | GCAGCCTCTCGCTCACTCACC | 4590 |
| 21 | H55_2-22 | GTGAGTGAGCGAGAGGCTGCT | 3799 | AGCAGCCTCTCGCTCACTCAC | 4591 |
| 21 | H55_3-23 | TGAGTGAGCGAGAGGCTGCTT | 3800 | AAGCAGCCTCTCGCTCACTCA | 4592 |
| 21 | H55_4-24 | GAGTGAGCGAGAGGCTGCTTT | 3801 | AAAGCAGCCTCTCGCTCACTC | 4593 |
| 21 | H55_5-25 | AGTGAGCGAGAGGCTGCTTTG | 3802 | CAAAGCAGCCTCTCGCTCACT | 4594 |
| 21 | H55_6-26 | GTGAGCGAGAGGCTGCTTTGG | 3803 | CCAAAGCAGCCTCTCGCTCAC | 4595 |
| 21 | H55_7-27 | TGAGCGAGAGGCTGCTTTGGA | 3804 | TCCAAAGCAGCCTCTCGCTCA | 4596 |
| 21 | H55_8-28 | GAGCGAGAGGCTGCTTTGGAA | 3805 | TTCCAAAGCAGCCTCTCGCTC | 4597 |
| 21 | H55_9-29 | AGCGAGAGGCTGCTTTGGAAG | 3806 | CTTCCAAAGCAGCCTCTCGCT | 4598 |
| 21 | H55_10-30 | GCGAGAGGCTGCTTTGGAAGA | 3807 | TCTTCCAAAGCAGCCTCTCGC | 4599 |
| 21 | H55_11-31 | CGAGAGGCTGCTTTGGAAGAA | 3808 | TTCTTCCAAAGCAGCCTCTCG | 4600 |
| 21 | H55_12-32 | GAGAGGCTGCTTTGGAAGAAA | 3809 | TTTCTTCCAAAGCAGCCTCTC | 4601 |
| 21 | H55_13-33 | AGAGGCTGCTTTGGAAGAAAC | 3810 | GTTTCTTCCAAAGCAGCCTCT | 4602 |
| 21 | H55_14-34 | GAGGCTGCTTTGGAAGAAACT | 3811 | AGTTTCTTCCAAAGCAGCCTC | 4603 |
| 21 | H55_15-35 | AGGCTGCTTTGGAAGAAACTC | 3812 | GAGTTTCTTCCAAAGCAGCCT | 4604 |
| 21 | H55_16-36 | GGCTGCTTTGGAAGAAACTCA | 3813 | TGAGTTTCTTCCAAAGCAGCC | 4605 |
| 21 | H55_17-37 | GCTGCTTTGGAAGAAACTCAT | 3814 | ATGAGTTTCTTCCAAAGCAGC | 4606 |
| 21 | H55_18-38 | CTGCTTTGGAAGAAACTCATA | 3815 | TATGAGTTTCTTCCAAAGCAG | 4607 |
| 21 | H55_19-39 | TGCTTTGGAAGAAACTCATAG | 3816 | CTATGAGTTTCTTCCAAAGCA | 4608 |
| 21 | H55_20-40 | GCTTTGGAAGAAACTCATAGA | 3817 | TCTATGAGTTTCTTCCAAAGC | 4609 |
| 21 | H55_21-41 | CTTTGGAAGAAACTCATAGAT | 3818 | ATCTATGAGTTTCTTCCAAAG | 4610 |
| 21 | H55_22-42 | TTTGGAAGAAACTCATAGATT | 3819 | AATCTATGAGTTTCTTCCAAA | 4611 |
| 21 | H55_23-43 | TTGGAAGAAACTCATAGATTA | 3820 | TAATCTATGAGTTTCTTCCAA | 4612 |
| 21 | H55_24-44 | TGGAAGAAACTCATAGATTAC | 3821 | GTAATCTATGAGTTTCTTCCA | 4613 |
| 22 | H55_(−25)- | CATCTGAACATTTGGTCCTTT | 3822 | CAAAGGACCAAATGTTCAGAT | 4614 |
| | (−4) | G | | G | |
| 22 | H55_(−24)- | ATCTGAACATTTGGTCCTTTG | 3823 | GCAAAGGACCAAATGTTCAGA | 4615 |
| | (−3) | C | | T | |
| 22 | H55_(−23)- | TCTGAACATTTGGTCCTTTGC | 3824 | TGCAAAGGACCAAATGTTCAG | 4616 |
| | (−2) | A | | A | |
| 22 | H55_(−22)- | CTGAACATTTGGTCCTTTGCA | 3825 | CTGCAAAGGACCAAATGTTCA | 4617 |
| | (−1) | G | | G | |
| 22 | H55_(−21)- | TGAACATTTGGTCCTTTGCAG | 3826 | CCTGCAAAGGACCAAATGTTC | 4618 |
| | 1 | G | | A | |
| 22 | H55_(−20)- | GAACATTTGGTCCTTTGCAGG | 3827 | CCCTGCAAAGGACCAAATGTT | 4619 |
| | 2 | G | | C | |
| 22 | H55_(−19)- | AACATTTGGTCCTTTGCAGGG | 3828 | ACCCTGCAAAGGACCAAATGT | 4620 |
| | 3 | T | | T | |
| 22 | H55_(−18)- | ACATTTGGTCCTTTGCAGGGT | 3829 | CACCCTGCAAAGGACCAAATG | 4621 |
| | 4 | G | | T | |
| 22 | H55_(−17)- | CATTTGGTCCTTTGCAGGGTG | 3830 | TCACCCTGCAAAGGACCAAAT | 4622 |
| | 5 | A | | G | |
| 22 | H55_(−16)- | ATTTGGTCCTTTGCAGGGTGA | 3831 | CTCACCCTGCAAAGGACCAAA | 4623 |
| | 6 | G | | T | |
| 22 | H55_(−15)- | TTTGGTCCTTTGCAGGGTGAG | 3832 | ACTCACCCTGCAAAGGACCAA | 4624 |
| | 7 | T | | A | |
| 22 | H55_(−14)- | TTGGTCCTTTGCAGGGTGAGT | 3833 | CACTCACCCTGCAAAGGACCA | 4625 |
| | 8 | G | | A | |
| 22 | H55_(−13)- | TGGTCCTTTGCAGGGTGAGTG | 3834 | TCACTCACCCTGCAAAGGACC | 4626 |
| | 9 | A | | A | |
| 22 | H55_(−12)- | GGTCCTTTGCAGGGTGAGTGA | 3835 | CTCACTCACCCTGCAAAGGAC | 4627 |
| | 10 | G | | C | |
| 22 | H55_(−11)- | GTCCTTTGCAGGGTGAGTGAG | 3836 | GCTCACTCACCCTGCAAAGGA | 4628 |
| | 11 | C | | C | |
| 22 | H55_(−10)- | TCCTTTGCAGGGTGAGTGAGC | 3837 | CGCTCACTCACCCTGCAAAGG | 4629 |
| | 12 | G | | A | |
| 22 | H55_(−9)- | CCTTTGCAGGGTGAGTGAGCG | 3838 | TCGCTCACTCACCCTGCAAAG | 4630 |
| | 13 | A | | G | |
| 22 | H55_(−8)- | CTTTGCAGGGTGAGTGAGCGA | 3839 | CTCGCTCACTCACCCTGCAAA | 4631 |
| | 14 | G | | G | |
| 22 | H55_(−7)- | TTTGCAGGGTGAGTGAGCGAG | 3840 | TCTCGCTCACTCACCCTGCAA | 4632 |
| | 15 | A | | A | |
| 22 | H55_(−6)- | TTGCAGGGTGAGTGAGCGAGA | 3841 | CTCTCGCTCACTCACCCTGCA | 4633 |
| | 16 | G | | A | |
| 22 | H55_(−5)- | TGCAGGGTGAGTGAGCGAGAG | 3842 | CCTCTCGCTCACTCACCCTGC | 4634 |
| | 17 | G | | A | |
| 22 | H55_(−4)- | GCAGGGTGAGTGAGCGAGAGG | 3843 | GCCTCTCGCTCACTCACCCTG | 4635 |
| | 18 | C | | C | |
| 22 | H55_(−3)- | CAGGGTGAGTGAGCGAGAGGC | 3844 | AGCCTCTCGCTCACTCACCCT | 4636 |
| | 19 | T | | G | |
| 22 | H55_(−2)- | AGGGTGAGTGAGCGAGAGGCT | 3845 | CAGCCTCTCGCTCACTCACCC | 4637 |
| | 20 | G | | T | |
| 22 | H55_(−1)- | GGGTGAGTGAGCGAGAGGCTG | 3846 | GCAGCCTCTCGCTCACTCACC | 4638 |
| | 21 | C | | C | |
| 22 | H55_1-22 | GGTGAGTGAGCGAGAGGCTGC | 3847 | AGCAGCCTCTCGCTCACTCAC | 4639 |
| | | T | | C | |
| 22 | H55_2-23 | GTGAGTGAGCGAGAGGCTGCT | 3848 | AAGCAGCCTCTCGCTCACTCA | 4640 |
| | | T | | C | |
| 22 | H55_3-24 | TGAGTGAGCGAGAGGCTGCTT | 3849 | AAAGCAGCCTCTCGCTCACTC | 4641 |
| | | T | | A | |
| 22 | H55_4-25 | GAGTGAGCGAGAGGCTGCTTT | 3850 | CAAAGCAGCCTCTCGCTCACT | 4642 |
| | | G | | C | |
| 22 | H55_5-26 | AGTGAGCGAGAGGCTGCTTTG | 3851 | CCAAAGCAGCCTCTCGCTCAC | 4643 |
| | | G | | T | |
| 22 | H55_6-27 | GTGAGCGAGAGGCTGCTTTGG | 3852 | TCCAAAGCAGCCTCTCGCTCA | 4644 |
| | | A | | C | |
| 22 | H55_7-28 | TGAGCGAGAGGCTGCTTTGGA | 3853 | TTCCAAAGCAGCCTCTCGCTC | 4645 |
| | | A | | A | |
| 22 | H55_8-29 | GAGCGAGAGGCTGCTTTGGAA | 3854 | CTTCCAAAGCAGCCTCTCGCT | 4646 |
| | | G | | C | |
| 22 | H55_9-30 | AGCGAGAGGCTGCTTTGGAAG | 3855 | TCTTCCAAAGCAGCCTCTCGC | 4647 |
| | | A | | T | |
| 22 | H55_10-31 | GCGAGAGGCTGCTTTGGAAGA | 3856 | TTCTTCCAAAGCAGCCTCTCG | 4648 |
| | | A | | C | |
| 22 | H55_11-32 | CGAGAGGCTGCTTTGGAAGAA | 3857 | TTTCTTCCAAAGCAGCCTCTC | 4649 |
| | | A | | G | |
| 22 | H55_12-33 | GAGAGGCTGCTTTGGAAGAAA | 3858 | GTTTCTTCCAAAGCAGCCTCT | 4650 |
| | | C | | C | |
| 22 | H55_13-34 | AGAGGCTGCTTTGGAAGAAAC | 3859 | AGTTTCTTCCAAAGCAGCCTC | 4651 |
| | | T | | T | |
| 22 | H55_14-35 | GAGGCTGCTTTGGAAGAAACT | 3860 | GAGTTTCTTCCAAAGCAGCCT | 4652 |
| | | C | | C | |
| 22 | H55_15-36 | AGGCTGCTTTGGAAGAAACTC | 3861 | TGAGTTTCTTCCAAAGCAGCC | 4653 |
| | | A | | T | |
| 22 | H55_16-37 | GGCTGCTTTGGAAGAAACTCA | 3862 | ATGAGTTTCTTCCAAAGCAGC | 4654 |
| | | T | | C | |
| 22 | H55_17-38 | GCTGCTTTGGAAGAAACTCAT | 3863 | TATGAGTTTCTTCCAAAGCAG | 4655 |
| | | A | | C | |
| 22 | H55_18-39 | CTGCTTTGGAAGAAACTCATA | 3864 | CTATGAGTTTCTTCCAAAGCA | 4656 |
| | | G | | G | |
| 22 | H55_19-40 | TGCTTTGGAAGAAACTCATAG | 3865 | TCTATGAGTTTCTTCCAAAGC | 4657 |
| | | A | | A | |
| 22 | H55_20-41 | GCTTTGGAAGAAACTCATAGA | 3866 | ATCTATGAGTTTCTTCCAAAG | 4658 |
| | | T | | C | |
| 22 | H55_21-42 | CTTTGGAAGAAACTCATAGAT | 3867 | AATCTATGAGTTTCTTCCAAA | 4659 |
| | | T | | G | |
| 22 | H55_22-43 | TTTGGAAGAAACTCATAGATT | 3868 | TAATCTATGAGTTTCTTCCAA | 4660 |
| | | A | | A | |
| 22 | H55_23-44 | TTGGAAGAAACTCATAGATTA | 3869 | GTAATCTATGAGTTTCTTCCA | 4661 |
| | | C | | A | |
| 22 | H55_24-45 | TGGAAGAAACTCATAGATTAC | 3870 | AGTAATCTATGAGTTTCTTCC | 4662 |
| | | T | | A | |
| 23 | H55_(−26)- | GCATCTGAACATTTGGTCCTT | 3871 | CAAAGGACCAAATGTTCAGAT | 4663 |
| | (−4) | TG | | GC | |
| 23 | H55_(−25)- | CATCTGAACATTTGGTCCTTT | 3872 | GCAAAGGACCAAATGTTCAGA | 4664 |
| | (−3) | GC | | TG | |
| 23 | H55_(−24)- | ATCTGAACATTTGGTCCTTTG | 3873 | TGCAAAGGACCAAATGTTCAG | 4665 |
| | (−2) | CA | | AT | |
| 23 | H55_(−23)- | TCTGAACATTTGGTCCTTTGC | 3874 | CTGCAAAGGACCAAATGTTCA | 4666 |
| | (−1) | AG | | GA | |
| 23 | H55_(−22)- | CTGAACATTTGGTCCTTTGCA | 3875 | CCTGCAAAGGACCAAATGTTC | 4667 |
| | 1 | GG | | AG | |
| 23 | H55_(−21)- | TGAACATTTGGTCCTTTGCAG | 3876 | CCCTGCAAAGGACCAAATGTT | 4668 |
| | 2 | GG | | CA | |
| 23 | H55_(−20)- | GAACATTTGGTCCTTTGCAGG | 3877 | ACCCTGCAAAGGACCAAATGT | 4669 |
| | 3 | GT | | TC | |
| 23 | H55_(−19)- | AACATTTGGTCCTTTGCAGGG | 3878 | CACCCTGCAAAGGACCAAATG | 4670 |
| | 4 | TG | | TT | |
| 23 | H55_(−18)- | ACATTTGGTCCTTTGCAGGGT | 3879 | TCACCCTGCAAAGGACCAAAT | 4671 |
| | 5 | GA | | GT | |
| 23 | H55_(−17)- | CATTTGGTCCTTTGCAGGGTG | 3880 | CTCACCCTGCAAAGGACCAAA | 4672 |
| | 6 | AG | | TG | |
| 23 | H55_(−16)- | ATTTGGTCCTTTGCAGGGTGA | 3881 | ACTCACCCTGCAAAGGACCAA | 4673 |
| | 7 | GT | | AT | |
| 23 | H55_(−15)- | TTTGGTCCTTTGCAGGGTGAG | 3882 | CACTCACCCTGCAAAGGACCA | 4674 |
| | 8 | TG | | AA | |
| 23 | H55_(−14)- | TTGGTCCTTTGCAGGGTGAGT | 3883 | TCACTCACCCTGCAAAGGACC | 4675 |
| | 9 | GA | | AA | |
| 23 | H55_(−13)- | TGGTCCTTTGCAGGGTGAGTG | 3884 | CTCACTCACCCTGCAAAGGAC | 4676 |
| | 10 | AG | | CA | |
| 23 | H55_(−12)- | GGTCCTTTGCAGGGTGAGTGA | 3885 | GCTCACTCACCCTGCAAAGGA | 4677 |
| | 11 | GC | | CC | |
| 23 | H55_(−11)- | GTCCTTTGCAGGGTGAGTGAG | 3886 | CGCTCACTCACCCTGCAAAGG | 4678 |
| | 12 | CG | | AC | |
| 23 | H55_(−10)- | TCCTTTGCAGGGTGAGTGAGC | 3887 | TCGCTCACTCACCCTGCAAAG | 4679 |
| | 13 | GA | | GA | |
| 23 | H55_(−9)- | CCTTTGCAGGGTGAGTGAGCG | 3888 | CTCGCTCACTCACCCTGCAAA | 4680 |
| | 14 | AG | | GG | |
| 23 | H55_(−8)- | CTTTGCAGGGTGAGTGAGCGA | 3889 | TCTCGCTCACTCACCCTGCAA | 4681 |
| | 15 | GA | | AG | |
| 23 | H55_(−7)- | TTTGCAGGGTGAGTGAGCGAG | 3890 | CTCTCGCTCACTCACCCTGCA | 4682 |
| | 16 | AG | | AA | |
| 23 | H55_(−6)- | TTGCAGGGTGAGTGAGCGAGA | 3891 | CCTCTCGCTCACTCACCCTGC | 4683 |
| | 17 | GG | | AA | |
| 23 | H55_(−5)- | TGCAGGGTGAGTGAGCGAGAG | 3892 | GCCTCTCGCTCACTCACCCTG | 4684 |
| | 18 | GC | | CA | |
| 23 | H55_(−4)- | GCAGGGTGAGTGAGCGAGAGG | 3893 | AGCCTCTCGCTCACTCACCCT | 4685 |
| | 19 | CT | | GC | |
| 23 | H55_(−3)- | CAGGGTGAGTGAGCGAGAGGC | 3894 | CAGCCTCTCGCTCACTCACCC | 4686 |
| | 20 | TG | | TG | |
| 23 | H55_(−2)- | AGGGTGAGTGAGCGAGAGGCT | 3895 | GCAGCCTCTCGCTCACTCACC | 4687 |
| | 21 | GC | | CT | |
| 23 | H55_(−1)- | GGGTGAGTGAGCGAGAGGCTG | 3896 | AGCAGCCTCTCGCTCACTCAC | 4688 |
| | 22 | CT | | CC | |
| 23 | H55_1-23 | GGTGAGTGAGCGAGAGGCTGC | 3897 | AAGCAGCCTCTCGCTCACTCA | 4689 |
| | | TT | | CC | |
| 23 | H55 2-24 | GTGAGTGAGCGAGAGGCTGCT | 3898 | AAAGCAGCCTCTCGCTCACTC | 4690 |
| | | TT | | AC | |
| 23 | H55_3-25 | TGAGTGAGCGAGAGGCTGCTT | 3899 | CAAAGCAGCCTCTCGCTCACT | 4691 |
| | | TG | | CA | |
| 23 | H55_4-26 | GAGTGAGCGAGAGGCTGCTTT | 3900 | CCAAAGCAGCCTCTCGCTCAC | 4692 |
| | | GG | | TC | |
| 23 | H55_5-27 | AGTGAGCGAGAGGCTGCTTTG | 3901 | TCCAAAGCAGCCTCTCGCTCA | 4693 |
| | | GA | | CT | |
| 23 | H55_6-28 | GTGAGCGAGAGGCTGCTTTGG | 3902 | TTCCAAAGCAGCCTCTCGCTC | 4694 |
| | | AA | | AC | |
| 23 | H55_7-29 | TGAGCGAGAGGCTGCTTTGGA | 3903 | CTTCCAAAGCAGCCTCTCGCT | 4695 |
| | | AG | | CA | |
| 23 | H55_8-30 | GAGCGAGAGGCTGCTTTGGAA | 3904 | TCTTCCAAAGCAGCCTCTCGC | 4696 |
| | | GA | | TC | |
| 23 | H55_9-31 | AGCGAGAGGCTGCTTTGGAAG | 3905 | TTCTTCCAAAGCAGCCTCTCG | 4697 |
| | | AA | | CT | |
| 23 | H55_10-32 | GCGAGAGGCTGCTTTGGAAGA | 3906 | TTTCTTCCAAAGCAGCCTCTC | 4698 |
| | | AA | | GC | |
| 23 | H55_11-33 | CGAGAGGCTGCTTTGGAAGAA | 3907 | GTTTCTTCCAAAGCAGCCTCT | 4699 |
| | | AC | | CG | |
| 23 | H55_12-34 | GAGAGGCTGCTTTGGAAGAAA | 3908 | AGTTTCTTCCAAAGCAGCCTC | 4700 |
| | | CT | | TC | |
| 23 | H55_13-35 | AGAGGCTGCTTTGGAAGAAAC | 3909 | GAGTTTCTTCCAAAGCAGCCT | 4701 |
| | | TC | | CT | |
| 23 | H55_14-36 | GAGGCTGCTTTGGAAGAAACT | 3910 | TGAGTTTCTTCCAAAGCAGCC | 4702 |
| | | CA | | TC | |
| 23 | H55_15-37 | AGGCTGCTTTGGAAGAAACTC | 3911 | ATGAGTTTCTTCCAAAGCAGC | 4703 |
| | | AT | | CT | |
| 23 | H55_16-38 | GGCTGCTTTGGAAGAAACTCA | 3912 | TATGAGTTTCTTCCAAAGCAG | 4704 |
| | | TA | | CC | |
| 23 | H55_17-39 | GCTGCTTTGGAAGAAACTCAT | 3913 | CTATGAGTTTCTTCCAAAGCA | 4705 |
| | | AG | | GC | |
| 23 | H55_18-40 | CTGCTTTGGAAGAAACTCATA | 3914 | TCTATGAGTTTCTTCCAAAGC | 4706 |
| | | GA | | AG | |
| 23 | H55_19-41 | TGCTTTGGAAGAAACTCATAG | 3915 | ATCTATGAGTTTCTTCCAAAG | 4707 |
| | | AT | | CA | |
| 23 | H55_20-42 | GCTTTGGAAGAAACTCATAGA | 3916 | AATCTATGAGTTTCTTCCAAA | 4708 |
| | | TT | | GC | |
| 23 | H55_21-43 | CTTTGGAAGAAACTCATAGAT | 3917 | TAATCTATGAGTTTCTTCCAA | 4709 |
| | | TA | | AG | |
| 23 | H55_22-44 | TTTGGAAGAAACTCATAGATT | 3918 | GTAATCTATGAGTTTCTTCCA | 4710 |
| | | AC | | AA | |
| 23 | H55_23-45 | TTGGAAGAAACTCATAGATTA | 3919 | AGTAATCTATGAGTTTCTTCC | 4711 |
| | | CT | | AA | |
| 23 | H55_24-46 | TGGAAGAAACTCATAGATTAC | 3920 | CAGTAATCTATGAGTTTCTTC | 4712 |
| | | TG | | CA | |
| 24 | H55_(−27)- | TGCATCTGAACATTTGGTCCT | 3921 | CAAAGGACCAAATGTTCAGAT | 4713 |
| | (−4) | TTG | | GCA | |
| 24 | H55_(−26)- | GCATCTGAACATTTGGTCCTT | 3922 | GCAAAGGACCAAATGTTCAGA | 4714 |
| | (−3) | TGC | | TGC | |
| 24 | H55_(−25)- | CATCTGAACATTTGGTCCTTT | 3923 | TGCAAAGGACCAAATGTTCAG | 4715 |
| | (−2) | GCA | | ATG | |
| 24 | H55_(−24)- | ATCTGAACATTTGGTCCTTTG | 3924 | CTGCAAAGGACCAAATGTTCA | 4716 |
| | (−1) | CAG | | GAT | |
| 24 | H55_(−23)- | TCTGAACATTTGGTCCTTTGC | 3925 | CCTGCAAAGGACCAAATGTTC | 4717 |
| | 1 | AGG | | AGA | |
| 24 | H55_(−22)- | CTGAACATTTGGTCCTTTGCA | 3926 | CCCTGCAAAGGACCAAATGTT | 4718 |
| | 2 | GGG | | CAG | |
| 24 | H55_(−21)- | TGAACATTTGGTCCTTTGCAG | 3927 | ACCCTGCAAAGGACCAAATGT | 4719 |
| | 3 | GGT | | TCA | |
| 24 | H55_(−20)- | GAACATTTGGTCCTTTGCAGG | 3928 | CACCCTGCAAAGGACCAAATG | 4720 |
| | 4 | GTG | | TTC | |
| 24 | H55_(−19)- | AACATTTGGTCCTTTGCAGGG | 3929 | TCACCCTGCAAAGGACCAAAT | 4721 |
| | 5 | TGA | | GTT | |
| 24 | H55_(−18)- | ACATTTGGTCCTTTGCAGGGT | 3930 | CTCACCCTGCAAAGGACCAAA | 4722 |
| | 6 | GAG | | TGT | |
| 24 | H55_(−17)- | CATTTGGTCCTTTGCAGGGTG | 3931 | ACTCACCCTGCAAAGGACCAA | 4723 |
| | 7 | AGT | | ATG | |
| 24 | H55_(−16)- | ATTTGGTCCTTTGCAGGGTGA | 3932 | CACTCACCCTGCAAAGGACCA | 4724 |
| | 8 | GTG | | AAT | |
| 24 | H55_(−15)- | TTTGGTCCTTTGCAGGGTGAG | 3933 | TCACTCACCCTGCAAAGGACC | 4725 |
| | 9 | TGA | | AAA | |
| 24 | H55_(−14)- | TTGGTCCTTTGCAGGGTGAGT | 3934 | CTCACTCACCCTGCAAAGGAC | 4726 |
| | 10 | GAG | | CAA | |
| 24 | H55_(−13)- | TGGTCCTTTGCAGGGTGAGTG | 3935 | GCTCACTCACCCTGCAAAGGA | 4727 |
| | 11 | AGC | | CCA | |
| 24 | H55_(−12)- | GGTCCTTTGCAGGGTGAGTGA | 3936 | CGCTCACTCACCCTGCAAAGG | 4728 |
| | 12 | GCG | | ACC | |
| 24 | H55_(−11)- | GTCCTTTGCAGGGTGAGTGAG | 3937 | TCGCTCACTCACCCTGCAAAG | 4729 |
| | 13 | CGA | | GAC | |
| 24 | H55_(−10)- | TCCTTTGCAGGGTGAGTGAGC | 3938 | CTCGCTCACTCACCCTGCAAA | 4730 |
| | 14 | GAG | | GGA | |
| 24 | H55_(−9)- | CCTTTGCAGGGTGAGTGAGCG | 3939 | TCTCGCTCACTCACCCTGCAA | 4731 |
| | 15 | AGA | | AGG | |
| 24 | H55_(−8)- | CTTTGCAGGGTGAGTGAGCGA | 3940 | CTCTCGCTCACTCACCCTGCA | 4732 |
| | 16 | GAG | | AAG | |
| 24 | H55_(−7)- | TTTGCAGGGTGAGTGAGCGAG | 3941 | CCTCTCGCTCACTCACCCTGC | 4733 |
| | 17 | AGG | | AAA | |
| 24 | H55_(−6)- | TTGCAGGGTGAGTGAGCGAGA | 3942 | GCCTCTCGCTCACTCACCCTG | 4734 |
| | 18 | GGC | | CAA | |
| 24 | H55_(−5)- | TGCAGGGTGAGTGAGCGAGAG | 3943 | AGCCTCTCGCTCACTCACCCT | 4735 |
| | 19 | GCT | | GCA | |
| 24 | H55_(−4)- | GCAGGGTGAGTGAGCGAGAGG | 3944 | CAGCCTCTCGCTCACTCACCC | 4736 |
| | 20 | CTG | | TGC | |
| 24 | H55_(−3)- | CAGGGTGAGTGAGCGAGAGGC | 3945 | GCAGCCTCTCGCTCACTCACC | 4737 |
| | 21 | TGC | | CTG | |
| 24 | H55_(−2)- | AGGGTGAGTGAGCGAGAGGCT | 3946 | AGCAGCCTCTCGCTCACTCAC | 4738 |
| | 22 | GCT | | CCT | |
| 24 | H55_(−1)- | GGGTGAGTGAGCGAGAGGCTG | 3947 | AAGCAGCCTCTCGCTCACTCA | 4739 |
| | 23 | CTT | | CCC | |
| 24 | H55_1-24 | GGTGAGTGAGCGAGAGGCTGC | 3948 | AAAGCAGCCTCTCGCTCACTC | 4740 |
| | | TTT | | ACC | |
| 24 | H55_2-25 | GTGAGTGAGCGAGAGGCTGCT | 3949 | CAAAGCAGCCTCTCGCTCACT | 4741 |
| | | TTG | | CAC | |
| 24 | H55_3-26 | TGAGTGAGCGAGAGGCTGCTT | 3950 | CCAAAGCAGCCTCTCGCTCAC | 4742 |
| | | TGG | | TCA | |
| 24 | H55_4-27 | GAGTGAGCGAGAGGCTGCTTT | 3951 | TCCAAAGCAGCCTCTCGCTCA | 4743 |
| | | GGA | | CTC | |
| 24 | H55_5-28 | AGTGAGCGAGAGGCTGCTTTG | 3952 | TTCCAAAGCAGCCTCTCGCTC | 4744 |
| | | GAA | | ACT | |
| 24 | H55_6-29 | GTGAGCGAGAGGCTGCTTTGG | 3953 | CTTCCAAAGCAGCCTCTCGCT | 4745 |
| | | AAG | | CAC | |
| 24 | H55_7-30 | TGAGCGAGAGGCTGCTTTGGA | 3954 | TCTTCCAAAGCAGCCTCTCGC | 4746 |
| | | AGA | | TCA | |
| 24 | H55_8-31 | GAGCGAGAGGCTGCTTTGGAA | 3955 | TTCTTCCAAAGCAGCCTCTCG | 4747 |
| | | GAA | | CTC | |
| 24 | H55_9-32 | AGCGAGAGGCTGCTTTGGAAG | 3956 | TTTCTTCCAAAGCAGCCTCTC | 4748 |
| | | AAA | | GCT | |
| 24 | H55_10-33 | GCGAGAGGCTGCTTTGGAAGA | 3957 | GTTTCTTCCAAAGCAGCCTCT | 4749 |
| | | AAC | | CGC | |
| 24 | H55_11-34 | CGAGAGGCTGCTTTGGAAGAA | 3958 | AGTTTCTTCCAAAGCAGCCTC | 4750 |
| | | ACT | | TCG | |
| 24 | H55_12-35 | GAGAGGCTGCTTTGGAAGAAA | 3959 | GAGTTTCTTCCAAAGCAGCCT | 4751 |
| | | CTC | | CTC | |
| 24 | H55_13-36 | AGAGGCTGCTTTGGAAGAAAC | 3960 | TGAGTTTCTTCCAAAGCAGCC | 4752 |
| | | TCA | | TCT | |
| 24 | H55_14-37 | GAGGCTGCTTTGGAAGAAACT | 3961 | ATGAGTTTCTTCCAAAGCAGC | 4753 |
| | | CAT | | CTO | |
| 24 | H55_15-38 | AGGCTGCTTTGGAAGAAACTC | 3962 | TATGAGTTTCTTCCAAAGCAG | 4754 |
| | | ATA | | CCT | |
| 24 | H55_16-39 | GGCTGCTTTGGAAGAAACTCA | 3963 | CTATGAGTTTCTTCCAAAGCA | 4755 |
| | | TAG | | GCC | |
| 24 | H55_17-40 | GCTGCTTTGGAAGAAACTCAT | 3964 | TCTATGAGTTTCTTCCAAAGC | 4756 |
| | | AGA | | AGC | |
| 24 | H55_18-41 | CTGCTTTGGAAGAAACTCATA | 3965 | ATCTATGAGTTTCTTCCAAAG | 4757 |
| | | GAT | | CAG | |
| 24 | H55_19-42 | TGCTTTGGAAGAAACTCATAG | 3966 | AATCTATGAGTTTCTTCCAAA | 4758 |
| | | ATT | | GCA | |
| 24 | H55_20-43 | GCTTTGGAAGAAACTCATAGA | 3967 | TAATCTATGAGTTTCTTCCAA | 4759 |
| | | TTA | | AGC | |
| 24 | H55_21-44 | CTTTGGAAGAAACTCATAGAT | 3968 | GTAATCTATGAGTTTCTTCCA | 4760 |
| | | TAC | | AAG | |
| 24 | H55_22-45 | TTTGGAAGAAACTCATAGATT | 3969 | AGTAATCTATGAGTTTCTTCC | 4761 |
| | | ACT | | AAA | |
| 24 | H55_23-46 | TTGGAAGAAACTCATAGATTA | 3970 | CAGTAATCTATGAGTTTCTTC | 4762 |
| | | CTG | | CAA | |
| 24 | H55_24-47 | TGGAAGAAACTCATAGATTAC | 3971 | GCAGTAATCTATGAGTTTCTT | 4763 |
| | | TGC | | CCA | |
| 25 | H55_(−28)- | TTGCATCTGAACATTTGGTCC | 3972 | CAAAGGACCAAATGTTCAGAT | 4764 |
| | (−4) | TTTG | | GCAA | |
| 25 | H55_(−27)- | TGCATCTGAACATTTGGTCCT | 3973 | GCAAAGGACCAAATGTTCAGA | 4765 |
| | (−3) | TTGC | | TGCA | |
| 25 | H55_(−26)- | GCATCTGAACATTTGGTCCTT | 3974 | TGCAAAGGACCAAATGTTCAG | 4766 |
| | (−2) | TGCA | | ATGC | |
| 25 | H55_(−25)- | CATCTGAACATTTGGTCCTTT | 3975 | CTGCAAAGGACCAAATGTTCA | 4767 |
| | (−1) | GCAG | | GATG | |
| 25 | H55_(−24)- | ATCTGAACATTTGGTCCTTTG | 3976 | CCTGCAAAGGACCAAATGTTC | 4768 |
| | 1 | CAGG | | AGAT | |
| 25 | H55_(−23)- | TCTGAACATTTGGTCCTTTGC | 3977 | CCCTGCAAAGGACCAAATGTT | 4769 |
| | 2 | AGGG | | CAGA | |
| 25 | H55_(−22)- | CTGAACATTTGGTCCTTTGCA | 3978 | ACCCTGCAAAGGACCAAATGT | 4770 |
| | 3 | GGGT | | TCAG | |
| 25 | H55_(−21)- | TGAACATTTGGTCCTTTGCAG | 3979 | CACCCTGCAAAGGACCAAATG | 4771 |
| | 4 | GGTG | | TTCA | |
| 25 | H55_(−20)- | GAACATTTGGTCCTTTGCAGG | 3980 | TCACCCTGCAAAGGACCAAAT | 4772 |
| | 5 | GTGA | | GTTC | |
| 25 | H55_(−19)- | AACATTTGGTCCTTTGCAGGG | 3981 | CTCACCCTGCAAAGGACCAAA | 4773 |
| | 6 | TGAG | | TGTT | |
| 25 | H55_(−18)- | ACATTTGGTCCTTTGCAGGGT | 3982 | ACTCACCCTGCAAAGGACCAA | 4774 |
| | 7 | GAGT | | ATGT | |
| 25 | H55_(−17)- | CATTTGGTCCTTTGCAGGGTG | 3983 | CACTCACCCTGCAAAGGACCA | 4775 |
| | 8 | AGTG | | AATG | |
| 25 | H55_(−16)- | ATTTGGTCCTTTGCAGGGTGA | 3984 | TCACTCACCCTGCAAAGGACC | 4776 |
| | 9 | GTGA | | AAAT | |
| 25 | H55_(−15)- | TTTGGTCCTTTGCAGGGTGAG | 3985 | CTCACTCACCCTGCAAAGGAC | 4777 |
| | 10 | TGAG | | CAAA | |
| 25 | H55_(−14)- | TTGGTCCTTTGCAGGGTGAGT | 3986 | GCTCACTCACCCTGCAAAGGA | 4778 |
| | 11 | GAGC | | CCAA | |
| 25 | H55_(−13)- | TGGTCCTTTGCAGGGTGAGTG | 3987 | CGCTCACTCACCCTGCAAAGG | 4779 |
| | 12 | AGCG | | ACCA | |
| 25 | H55_(−12)- | GGTCCTTTGCAGGGTGAGTGA | 3988 | TCGCTCACTCACCCTGCAAAG | 4780 |
| | 13 | GCGA | | GACC | |
| 25 | H55_(−11)- | GTCCTTTGCAGGGTGAGTGAG | 3989 | CTCGCTCACTCACCCTGCAAA | 4781 |
| | 14 | CGAG | | GGAC | |
| 25 | H55_(−10)- | TCCTTTGCAGGGTGAGTGAGC | 3990 | TCTCGCTCACTCACCCTGCAA | 4782 |
| | 15 | GAGA | | AGGA | |
| 25 | H55_(−9)- | CCTTTGCAGGGTGAGTGAGCG | 3991 | CTCTCGCTCACTCACCCTGCA | 4783 |
| | 16 | AGAG | | AAGG | |
| 25 | H55_(−8)- | CTTTGCAGGGTGAGTGAGCGA | 3992 | CCTCTCGCTCACTCACCCTGC | 4784 |
| | 17 | GAGG | | AAAG | |
| 25 | H55_(−7)- | TTTGCAGGGTGAGTGAGCGAG | 3993 | GCCTCTCGCTCACTCACCCTG | 4785 |
| | 18 | AGGC | | CAAA | |
| 25 | H55_(−6)- | TTGCAGGGTGAGTGAGCGAGA | 3994 | AGCCTCTCGCTCACTCACCCT | 4786 |
| | 19 | GGCT | | GCAA | |
| 25 | H55_(−5)- | TGCAGGGTGAGTGAGCGAGAG | 3995 | CAGCCTCTCGCTCACTCACCC | 4787 |
| | 20 | GCTG | | TGCA | |
| 25 | H55_(−4)- | GCAGGGTGAGTGAGCGAGAGG | 3996 | GCAGCCTCTCGCTCACTCACC | 4788 |
| | 21 | CTGC | | CTGC | |
| 25 | H55_(−3)- | CAGGGTGAGTGAGCGAGAGGC | 3997 | AGCAGCCTCTCGCTCACTCAC | 4789 |
| | 22 | TGCT | | CCTG | |
| 25 | H55_(−2)- | AGGGTGAGTGAGCGAGAGGCT | 3998 | AAGCAGCCTCTCGCTCACTCA | 4790 |
| | 23 | GCTT | | CCCT | |
| 25 | H55_(−1)- | GGGTGAGTGAGCGAGAGGCTG | 3999 | AAAGCAGCCTCTCGCTCACTC | 4791 |
| | 24 | CTTT | | ACCC | |
| 25 | H55_1-25 | GGTGAGTGAGCGAGAGGCTGC | 4000 | CAAAGCAGCCTCTCGCTCACT | 4792 |
| | | TTTG | | CACC | |
| 25 | H55_2-26 | GTGAGTGAGCGAGAGGCTGCT | 4001 | CCAAAGCAGCCTCTCGCTCAC | 4793 |
| | | TTGG | | TCAC | |
| 25 | H55_3-27 | TGAGTGAGCGAGAGGCTGCTT | 4002 | TCCAAAGCAGCCTCTCGCTCA | 4794 |
| | | TGGA | | CTCA | |
| 25 | H55_4-28 | GAGTGAGCGAGAGGCTGCTTT | 4003 | TTCCAAAGCAGCCTCTCGCTC | 4795 |
| | | GGAA | | ACTC | |
| 25 | H55_5-29 | AGTGAGCGAGAGGCTGCTTTG | 4004 | CTTCCAAAGCAGCCTCTCGCT | 4796 |
| | | GAAG | | CACT | |
| 25 | H55_6-30 | GTGAGCGAGAGGCTGCTTTGG | 4005 | TCTTCCAAAGCAGCCTCTCGC | 4797 |
| | | AAGA | | TCAC | |
| 25 | H55_7-31 | TGAGCGAGAGGCTGCTTTGGA | 4006 | TTCTTCCAAAGCAGCCTCTCG | 4798 |
| | | AGAA | | CTCA | |
| 25 | H55_8-32 | GAGCGAGAGGCTGCTTTGGAA | 4007 | TTTCTTCCAAAGCAGCCTCTC | 4799 |
| | | GAAA | | GCTC | |
| 25 | H55_9-33 | AGCGAGAGGCTGCTTTGGAAG | 4008 | GTTTCTTCCAAAGCAGCCTCT | 4800 |
| | | AAAC | | CGCT | |
| 25 | H55_10-34 | GCGAGAGGCTGCTTTGGAAGA | 4009 | AGTTTCTTCCAAAGCAGCCTC | 4801 |
| | | AACT | | TCGC | |
| 25 | H55_11-35 | CGAGAGGCTGCTTTGGAAGAA | 4010 | GAGTTTCTTCCAAAGCAGCCT | 4802 |
| | | ACTC | | CTCG | |
| 25 | H55_12-36 | GAGAGGCTGCTTTGGAAGAAA | 4011 | TGAGTTTCTTCCAAAGCAGCC | 4803 |
| | | CTCA | | TCTC | |
| 25 | H55_13-37 | AGAGGCTGCTTTGGAAGAAAC | 4012 | ATGAGTTTCTTCCAAAGCAGC | 4804 |
| | | TCAT | | CTCT | |
| 25 | H55_14-38 | GAGGCTGCTTTGGAAGAAACT | 4013 | TATGAGTTTCTTCCAAAGCAG | 4805 |
| | | CATA | | CCTC | |
| 25 | H55_15-39 | AGGCTGCTTTGGAAGAAACTC | 4014 | CTATGAGTTTCTTCCAAAGCA | 4806 |
| | | ATAG | | GCCT | |
| 25 | H55_16-40 | GGCTGCTTTGGAAGAAACTCA | 4015 | TCTATGAGTTTCTTCCAAAGC | 4807 |
| | | TAGA | | AGCC | |
| 25 | H55_17-41 | GCTGCTTTGGAAGAAACTCAT | 4016 | ATCTATGAGTTTCTTCCAAAG | 4808 |
| | | AGAT | | CAGC | |
| 25 | H55_18-42 | CTGCTTTGGAAGAAACTCATA | 4017 | AATCTATGAGTTTCTTCCAAA | 4809 |
| | | GATT | | GCAG | |
| 25 | H55_19-43 | TGCTTTGGAAGAAACTCATAG | 4018 | TAATCTATGAGTTTCTTCCAA | 4810 |
| | | ATTA | | AGCA | |
| 25 | H55_20-44 | GCTTTGGAAGAAACTCATAGA | 4019 | GTAATCTATGAGTTTCTTCCA | 4811 |
| | | TTAC | | AAGC | |
| 25 | H55_21-45 | CTTTGGAAGAAACTCATAGAT | 4020 | AGTAATCTATGAGTTTCTTCC | 4812 |
| | | TACT | | AAAG | |
| 25 | H55_22-46 | TTTGGAAGAAACTCATAGATT | 4021 | CAGTAATCTATGAGTTTCTTC | 4813 |
| | | ACTG | | CAAA | |
| 25 | H55_23-47 | TTGGAAGAAACTCATAGATTA | 4022 | GCAGTAATCTATGAGTTTCTT | 4814 |
| | | CTGC | | CCAA | |
| 25 | H55_24-48 | TGGAAGAAACTCATAGATTAC | 4023 | TGCAGTAATCTATGAGTTTCT | 4815 |
| | | TGCA | | TCCA | |
| 26 | H55_(−29)- | ATTGCATCTGAACATTTGGTC | 4024 | CAAAGGACCAAATGTTCAGAT | 4816 |
| | (−4) | CTTTG | | GCAAT | |
| 26 | H55_(−28)- | TTGCATCTGAACATTTGGTCC | 4025 | GCAAAGGACCAAATGTTCAGA | 4817 |
| | (−3) | TTTGC | | TGCAA | |
| 26 | H55_(−27)- | TGCATCTGAACATTTGGTCCT | 4026 | TGCAAAGGACCAAATGTTCAG | 4818 |
| | (−2) | TTGCA | | ATGCA | |
| 26 | H55_(−26)- | GCATCTGAACATTTGGTCCTT | 4027 | CTGCAAAGGACCAAATGTTCA | 4819 |
| | (−1) | TGCAG | | GATGC | |
| 26 | H55_(−25)- | CATCTGAACATTTGGTCCTTT | 4028 | CCTGCAAAGGACCAAATGTTC | 4820 |
| | 1 | GCAGG | | AGATG | |
| 26 | H55_(−24)- | ATCTGAACATTTGGTCCTTTG | 4029 | CCCTGCAAAGGACCAAATGTT | 4821 |
| | 2 | CAGGG | | CAGAT | |
| 26 | H55_(−23)- | TCTGAACATTTGGTCCTTTGC | 4030 | ACCCTGCAAAGGACCAAATGT | 4822 |
| | 3 | AGGGT | | TCAGA | |
| 26 | H55_(−22)- | CTGAACATTTGGTCCTTTGCA | 4031 | CACCCTGCAAAGGACCAAATG | 4823 |
| | 4 | GGGTG | | TTCAG | |
| 26 | H55_(−21)- | TGAACATTTGGTCCTTTGCAG | 4032 | TCACCCTGCAAAGGACCAAAT | 4824 |
| | 5 | GGTGA | | GTTCA | |
| 26 | H55_(−20)- | GAACATTTGGTCCTTTGCAGG | 4033 | CTCACCCTGCAAAGGACCAAA | 4825 |
| | 6 | GTGAG | | TGTTC | |
| 26 | H55_(−19)- | AACATTTGGTCCTTTGCAGGG | 4034 | ACTCACCCTGCAAAGGACCAA | 4826 |
| | 7 | TGAGT | | ATGTT | |
| 26 | H55_(−18)- | ACATTTGGTCCTTTGCAGGGT | 4035 | CACTCACCCTGCAAAGGACCA | 4827 |
| | 8 | GAGTG | | AATGT | |
| 26 | H55_(−17)- | CATTTGGTCCTTTGCAGGGTG | 4036 | TCACTCACCCTGCAAAGGACC | 4828 |
| | 9 | AGTGA | | AAATG | |
| 26 | H55_(−16)- | ATTTGGTCCTTTGCAGGGTGA | 4037 | CTCACTCACCCTGCAAAGGAC | 4829 |
| | 10 | GTGAG | | CAAAT | |
| 26 | H55_(−15)- | TTTGGTCCTTTGCAGGGTGAG | 4038 | GCTCACTCACCCTGCAAAGGA | 4830 |
| | 11 | TGAGC | | CCAAA | |
| 26 | H55_(−14)- | TTGGTCCTTTGCAGGGTGAGT | 4039 | CGCTCACTCACCCTGCAAAGG | 4831 |
| | 12 | GAGCG | | ACCAA | |
| 26 | H55_(−13)- | TGGTCCTTTGCAGGGTGAGTG | 4040 | TCGCTCACTCACCCTGCAAAG | 4832 |
| | 13 | AGCGA | | GACCA | |
| 26 | H55_(−12)- | GGTCCTTTGCAGGGTGAGTGA | 4041 | CTCGCTCACTCACCCTGCAAA | 4833 |
| | 14 | GCGAG | | GGACC | |
| 26 | H55_(−11)- | GTCCTTTGCAGGGTGAGTGAG | 4042 | TCTCGCTCACTCACCCTGCAA | 4834 |
| | 15 | CGAGA | | AGGAC | |
| 26 | H55_(−10)- | TCCTTTGCAGGGTGAGTGAGC | 4043 | CTCTCGCTCACTCACCCTGCA | 4835 |
| | 16 | GAGAG | | AAGGA | |
| 26 | H55_(−9)- | CCTTTGCAGGGTGAGTGAGCG | 4044 | CCTCTCGCTCACTCACCCTGC | 4836 |
| | 17 | AGAGG | | AAAGG | |
| 26 | H55_(−8)- | CTTTGCAGGGTGAGTGAGCGA | 4045 | GCCTCTCGCTCACTCACCCTG | 4837 |
| | 18 | GAGGC | | CAAAG | |
| 26 | H55_(−7)- | TTTGCAGGGTGAGTGAGCGAG | 4046 | AGCCTCTCGCTCACTCACCCT | 4838 |
| | 19 | AGGCT | | GCAAA | |
| 26 | H55_(−6)- | TTGCAGGGTGAGTGAGCGAGA | 4047 | CAGCCTCTCGCTCACTCACCC | 4839 |
| | 20 | GGCTG | | TGCAA | |
| 26 | H55_(−5)- | TGCAGGGTGAGTGAGCGAGAG | 4048 | GCAGCCTCTCGCTCACTCACC | 4840 |
| | 21 | GCTGC | | CTGCA | |
| 26 | H55_(−4)- | GCAGGGTGAGTGAGCGAGAGG | 4049 | AGCAGCCTCTCGCTCACTCAC | 4841 |
| | 22 | CTGCT | | CCTGC | |
| 26 | H55_(−3)- | CAGGGTGAGTGAGCGAGAGGC | 4050 | AAGCAGCCTCTCGCTCACTCA | 4842 |
| | 23 | TGCTT | | CCCTG | |
| 26 | H55_(−2)- | AGGGTGAGTGAGCGAGAGGCT | 4051 | AAAGCAGCCTCTCGCTCACTC | 4843 |
| | 24 | GCTTT | | ACCCT | |
| 26 | H55_(−1)- | GGGTGAGTGAGCGAGAGGCTG | 4052 | CAAAGCAGCCTCTCGCTCACT | 4844 |
| | 25 | CTTTG | | CACCC | |
| 26 | H55_1-26 | GGTGAGTGAGCGAGAGGCTGC | 4053 | CCAAAGCAGCCTCTCGCTCAC | 4845 |
| | | TTTGG | | TCACC | |
| 26 | H55_2-27 | GTGAGTGAGCGAGAGGCTGCT | 4054 | TCCAAAGCAGCCTCTCGCTCA | 4846 |
| | | TTGGA | | CTCAC | |
| 26 | H55_3-28 | TGAGTGAGCGAGAGGCTGCTT | 4055 | TTCCAAAGCAGCCTCTCGCTC | 4847 |
| | | TGGAA | | ACTCA | |
| 26 | H55_4-29 | GAGTGAGCGAGAGGCTGCTTT | 4056 | CTTCCAAAGCAGCCTCTCGCT | 4848 |
| | | GGAAG | | CACTC | |
| 26 | H55_5-30 | AGTGAGCGAGAGGCTGCTTTG | 4057 | TCTTCCAAAGCAGCCTCTCGC | 4849 |
| | | GAAGA | | TCACT | |
| 26 | H55_6-31 | GTGAGCGAGAGGCTGCTTTGG | 4058 | TTCTTCCAAAGCAGCCTCTCG | 4850 |
| | | AAGAA | | CTCAC | |
| 26 | H55_7-32 | TGAGCGAGAGGCTGCTTTGGA | 4059 | TTTCTTCCAAAGCAGCCTCTC | 4851 |
| | | AGAAA | | GCTCA | |
| 26 | H55_8-33 | GAGCGAGAGGCTGCTTTGGAA | 4060 | GTTTCTTCCAAAGCAGCCTCT | 4852 |
| | | GAAAC | | CGCTC | |
| 26 | H55_9-34 | AGCGAGAGGCTGCTTTGGAAG | 4061 | AGTTTCTTCCAAAGCAGCCTC | 4853 |
| | | AAACT | | TCGCT | |
| 26 | H55_10-35 | GCGAGAGGCTGCTTTGGAAGA | 4062 | GAGTTTCTTCCAAAGCAGCCT | 4854 |
| | | AACTC | | CTCGC | |
| 26 | H55_11-36 | CGAGAGGCTGCTTTGGAAGAA | 4063 | TGAGTTTCTTCCAAAGCAGCC | 4855 |
| | | ACTCA | | TCTCG | |
| 26 | H55_12-37 | GAGAGGCTGCTTTGGAAGAAA | 4064 | ATGAGTTTCTTCCAAAGCAGC | 4856 |
| | | CTCAT | | CTCTC | |
| 26 | H55_13-38 | AGAGGCTGCTTTGGAAGAAAC | 4065 | TATGAGTTTCTTCCAAAGCAG | 4857 |
| | | TCATA | | CCTCT | |
| 26 | H55_14-39 | GAGGCTGCTTTGGAAGAAACT | 4066 | CTATGAGTTTCTTCCAAAGCA | 4858 |
| | | CATAG | | GCCTC | |
| 26 | H55_15-40 | AGGCTGCTTTGGAAGAAACTC | 4067 | TCTATGAGTTTCTTCCAAAGC | 4859 |
| | | ATAGA | | AGCCT | |
| 26 | H55_16-41 | GGCTGCTTTGGAAGAAACTCA | 4068 | ATCTATGAGTTTCTTCCAAAG | 4860 |
| | | TAGAT | | CAGCC | |
| 26 | H55_17-42 | GCTGCTTTGGAAGAAACTCAT | 4069 | AATCTATGAGTTTCTTCCAAA | 4861 |
| | | AGATT | | GCAGC | |
| 26 | H55_18-43 | CTGCTTTGGAAGAAACTCATA | 4070 | TAATCTATGAGTTTCTTCCAA | 4862 |
| | | GATTA | | AGCAG | |
| 26 | H55_19-44 | TGCTTTGGAAGAAACTCATAG | 4071 | GTAATCTATGAGTTTCTTCCA | 4863 |
| | | ATTAC | | AAGCA | |
| 26 | H55_20-45 | GCTTTGGAAGAAACTCATAGA | 4072 | AGTAATCTATGAGTTTCTTCC | 4864 |
| | | TTACT | | AAAGC | |
| 26 | H55_21-46 | CTTTGGAAGAAACTCATAGAT | 4073 | CAGTAATCTATGAGTTTCTTC | 4865 |
| | | TACTG | | CAAAG | |
| 26 | H55_22-47 | TTTGGAAGAAACTCATAGATT | 4074 | GCAGTAATCTATGAGTTTCTT | 4866 |
| | | ACTGC | | CCAAA | |
| 26 | H55_23-48 | TTGGAAGAAACTCATAGATTA | 4075 | TGCAGTAATCTATGAGTTTCT | 4867 |
| | | CTGCA | | TCCAA | |
| 26 | H55_24-49 | TGGAAGAAACTCATAGATTAC | 4076 | TTGCAGTAATCTATGAGTTTC | 4868 |
| | | TGCAA | | TTCCA | |
| 27 | H55_(−30)- | AATTGCATCTGAACATTTGGT | 4077 | CAAAGGACCAAATGTTCAGAT | 4869 |
| | (−4) | CCTTTG | | GCAATT | |
| 27 | H55_(−29)- | ATTGCATCTGAACATTTGGTC | 4078 | GCAAAGGACCAAATGTTCAGA | 4870 |
| | (−3) | CTTTGC | | TGCAAT | |
| 27 | H55_(−28)- | TTGCATCTGAACATTTGGTCC | 4079 | TGCAAAGGACCAAATGTTCAG | 4871 |
| | (−2) | TTTGCA | | ATGCAA | |
| 27 | H55_(−27)- | TGCATCTGAACATTTGGTCCT | 4080 | CTGCAAAGGACCAAATGTTCA | 4872 |
| | (−1) | TTGCAG | | GATGCA | |
| 27 | H55_(−26)- | GCATCTGAACATTTGGTCCTT | 4081 | CCTGCAAAGGACCAAATGTTC | 4873 |
| | 1 | TGCAGG | | AGATGC | |
| 27 | H55_(−25)- | CATCTGAACATTTGGTCCTTT | 4082 | CCCTGCAAAGGACCAAATGTT | 4874 |
| | 2 | GCAGGG | | CAGATG | |
| 27 | H55_(−24)- | ATCTGAACATTTGGTCCTTTG | 4083 | ACCCTGCAAAGGACCAAATGT | 4875 |
| | 3 | CAGGGT | | TCAGAT | |
| 27 | H55_(−23)- | TCTGAACATTTGGTCCTTTGC | 4084 | CACCCTGCAAAGGACCAAATG | 4876 |
| | 4 | AGGGTG | | TTCAGA | |
| 27 | H55_(−22)- | CTGAACATTTGGTCCTTTGCA | 4085 | TCACCCTGCAAAGGACCAAAT | 4877 |
| | 5 | GGGTGA | | GTTCAG | |
| 27 | H55_(−21)- | TGAACATTTGGTCCTTTGCAG | 4086 | CTCACCCTGCAAAGGACCAAA | 4878 |
| | 6 | GGTGAG | | TGTTCA | |
| 27 | H55_(−20)- | GAACATTTGGTCCTTTGCAGG | 4087 | ACTCACCCTGCAAAGGACCAA | 4879 |
| | 7 | GTGAGT | | ATGTTC | |
| 27 | H55_(−19)- | AACATTTGGTCCTTTGCAGGG | 4088 | CACTCACCCTGCAAAGGACCA | 4880 |
| | 8 | TGAGTG | | AATGTT | |
| 27 | H55_(−18)- | ACATTTGGTCCTTTGCAGGGT | 4089 | TCACTCACCCTGCAAAGGACC | 4881 |
| | 9 | GAGTGA | | AAATGT | |
| 27 | H55_(−17)- | CATTTGGTCCTTTGCAGGGTG | 4090 | CTCACTCACCCTGCAAAGGAC | 4882 |
| | 10 | AGTGAG | | CAAATG | |
| 27 | H55_(−16)- | ATTTGGTCCTTTGCAGGGTGA | 4091 | GCTCACTCACCCTGCAAAGGA | 4883 |
| | 11 | GTGAGC | | CCAAAT | |
| 27 | H55_(−15)- | TTTGGTCCTTTGCAGGGTGAG | 4092 | CGCTCACTCACCCTGCAAAGG | 4884 |
| | 12 | TGAGCG | | ACCAAA | |
| 27 | H55_(−14)- | TTGGTCCTTTGCAGGGTGAGT | 4093 | TCGCTCACTCACCCTGCAAAG | 4885 |
| | 13 | GAGCGA | | GACCAA | |
| 27 | H55_(−13)- | TGGTCCTTTGCAGGGTGAGTG | 4094 | CTCGCTCACTCACCCTGCAAA | 4886 |
| | 14 | AGCGAG | | GGACCA | |
| 27 | H55_(−12)- | GGTCCTTTGCAGGGTGAGTGA | 4095 | TCTCGCTCACTCACCCTGCAA | 4887 |
| | 15 | GCGAGA | | AGGACC | |
| 27 | H55_(−11)- | GTCCTTTGCAGGGTGAGTGAG | 4096 | CTCTCGCTCACTCACCCTGCA | 4888 |
| | 16 | CGAGAG | | AAGGAC | |
| 27 | H55_(−10)- | TCCTTTGCAGGGTGAGTGAGC | 4097 | CCTCTCGCTCACTCACCCTGC | 4889 |
| | 17 | GAGAGG | | AAAGGA | |
| 27 | H55_(−9)- | CCTTTGCAGGGTGAGTGAGCG | 4098 | GCCTCTCGCTCACTCACCCTG | 4890 |
| | 18 | AGAGGC | | CAAAGG | |
| 27 | H55_(−8)- | CTTTGCAGGGTGAGTGAGCGA | 4099 | AGCCTCTCGCTCACTCACCCT | 4891 |
| | 19 | GAGGCT | | GCAAAG | |
| 27 | H55_(−7)- | TTTGCAGGGTGAGTGAGCGAG | 4100 | CAGCCTCTCGCTCACTCACCC | 4892 |
| | 20 | AGGCTG | | TGCAAA | |
| 27 | H55_(−6)- | TTGCAGGGTGAGTGAGCGAGA | 4101 | GCAGCCTCTCGCTCACTCACC | 4893 |
| | 21 | GGCTGC | | CTGCAA | |
| 27 | H55_(−5)- | TGCAGGGTGAGTGAGCGAGAG | 4102 | AGCAGCCTCTCGCTCACTCAC | 4894 |
| | 22 | GCTGCT | | CCTGCA | |
| 27 | H55_(−4)- | GCAGGGTGAGTGAGCGAGAGG | 4103 | AAGCAGCCTCTCGCTCACTCA | 4895 |
| | 23 | CTGCTT | | CCCTGC | |
| 27 | H55_(−3)- | CAGGGTGAGTGAGCGAGAGGC | 4104 | AAAGCAGCCTCTCGCTCACTC | 4896 |
| | 24 | TGCTTT | | ACCCTG | |
| 27 | H55_(−2)- | AGGGTGAGTGAGCGAGAGGCT | 4105 | CAAAGCAGCCTCTCGCTCACT | 4897 |
| | 25 | GCTTTG | | CACCCT | |
| 27 | H55_(−1)- | GGGTGAGTGAGCGAGAGGCTG | 4106 | CCAAAGCAGCCTCTCGCTCAC | 4898 |
| | 26 | CTTTGG | | TCACCC | |
| 27 | H55_1-27 | GGTGAGTGAGCGAGAGGCTGC | 4107 | TCCAAAGCAGCCTCTCGCTCA | 4899 |
| | | TTTGGA | | CTCACC | |
| 27 | H55_2-28 | GTGAGTGAGCGAGAGGCTGCT | 4108 | TTCCAAAGCAGCCTCTCGCTC | 4900 |
| | | TTGGAA | | ACTCAC | |
| 27 | H55_3-29 | TGAGTGAGCGAGAGGCTGCTT | 4109 | CTTCCAAAGCAGCCTCTCGCT | 4901 |
| | | TGGAAG | | CACTCA | |
| 27 | H55_4-30 | GAGTGAGCGAGAGGCTGCTTT | 4110 | TCTTCCAAAGCAGCCTCTCGC | 4902 |
| | | GGAAGA | | TCACTC | |
| 27 | H55_5-31 | AGTGAGCGAGAGGCTGCTTTG | 4111 | TTCTTCCAAAGCAGCCTCTCG | 4903 |
| | | GAAGAA | | CTCACT | |
| 27 | H55_6-32 | GTGAGCGAGAGGCTGCTTTGG | 4112 | TTTCTTCCAAAGCAGCCTCTC | 4904 |
| | | AAGAAA | | GCTCAC | |
| 27 | H55_7-33 | TGAGCGAGAGGCTGCTTTGGA | 4113 | GTTTCTTCCAAAGCAGCCTCT | 4905 |
| | | AGAAAC | | CGCTCA | |
| 27 | H55_8-34 | GAGCGAGAGGCTGCTTTGGAA | 4114 | AGTTTCTTCCAAAGCAGCCTC | 4906 |
| | | GAAACT | | TCGCTC | |
| 27 | H55_9-35 | AGCGAGAGGCTGCTTTGGAAG | 4115 | GAGTTTCTTCCAAAGCAGCCT | 4907 |
| | | AAACTC | | CTCGCT | |
| 27 | H55_10-36 | GCGAGAGGCTGCTTTGGAAGA | 4116 | TGAGTTTCTTCCAAAGCAGCC | 4908 |
| | | AACTCA | | TCTCGC | |
| 27 | H55_11-37 | CGAGAGGCTGCTTTGGAAGAA | 4117 | ATGAGTTTCTTCCAAAGCAGC | 4909 |
| | | ACTCAT | | CTCTCG | |
| 27 | H55_12-38 | GAGAGGCTGCTTTGGAAGAAA | 4118 | TATGAGTTTCTTCCAAAGCAG | 4910 |
| | | CTCATA | | CCTCTC | |
| 27 | H55_13-39 | AGAGGCTGCTTTGGAAGAAAC | 4119 | CTATGAGTTTCTTCCAAAGCA | 4911 |
| | | TCATAG | | GCCTCT | |
| 27 | H55_14-40 | GAGGCTGCTTTGGAAGAAACT | 4120 | TCTATGAGTTTCTTCCAAAGC | 4912 |
| | | CATAGA | | AGCCTC | |
| 27 | H55_15-41 | AGGCTGCTTTGGAAGAAACTC | 4121 | ATCTATGAGTTTCTTCCAAAG | 4913 |
| | | ATAGAT | | CAGCCT | |
| 27 | H55_16-42 | GGCTGCTTTGGAAGAAACTCA | 4122 | AATCTATGAGTTTCTTCCAAA | 4914 |
| | | TAGATT | | GCAGCC | |
| 27 | H55_17-43 | GCTGCTTTGGAAGAAACTCAT | 4123 | TAATCTATGAGTTTCTTCCAA | 4915 |
| | | AGATTA | | AGCAGC | |
| 27 | H55_18-44 | CTGCTTTGGAAGAAACTCATA | 4124 | GTAATCTATGAGTTTCTTCCA | 4916 |
| | | GATTAC | | AAGCAG | |
| 27 | H55_19-45 | TGCTTTGGAAGAAACTCATAG | 4125 | AGTAATCTATGAGTTTCTTCC | 4917 |
| | | ATTACT | | AAAGCA | |
| 27 | H55_20-46 | GCTTTGGAAGAAACTCATAGA | 4126 | CAGTAATCTATGAGTTTCTTC | 4918 |
| | | TTACTG | | CAAAGC | |
| 27 | H55_21-47 | CTTTGGAAGAAACTCATAGAT | 4127 | GCAGTAATCTATGAGTTTCTT | 4919 |
| | | TACTGC | | CCAAAG | |
| 27 | H55_22-48 | TTTGGAAGAAACTCATAGATT | 4128 | TGCAGTAATCTATGAGTTTCT | 4920 |
| | | ACTGCA | | TCCAAA | |
| 27 | H55_23-49 | TTGGAAGAAACTCATAGATTA | 4129 | TTGCAGTAATCTATGAGTTTC | 4921 |
| | | CTGCAA | | TTCCAA | |
| 27 | H55_24-50 | TGGAAGAAACTCATAGATTAC | 4130 | GTTGCAGTAATCTATGAGTTT | 4922 |
| | | TGCAAC | | CTTCCA | |
| 28 | H55_(−31)- | TAATTGCATCTGAACATTTGG | 4131 | CAAAGGACCAAATGTTCAGAT | 4923 |
| | (−4) | TCCTTTG | | GCAATTA | |
| 28 | H55_(−30)- | AATTGCATCTGAACATTTGGT | 4132 | GCAAAGGACCAAATGTTCAGA | 4924 |
| | (−3) | CCTTTGC | | TGCAATT | |
| 28 | H55_(−29)- | ATTGCATCTGAACATTTGGTC | 4133 | TGCAAAGGACCAAATGTTCAG | 4925 |
| | (−2) | CTTTGCA | | ATGCAAT | |
| 28 | H55_(−28)- | TTGCATCTGAACATTTGGTCC | 4134 | CTGCAAAGGACCAAATGTTCA | 4926 |
| | (−1) | TTTGCAG | | GATGCAA | |
| 28 | H55_(−27)- | TGCATCTGAACATTTGGTCCT | 4135 | CCTGCAAAGGACCAAATGTTC | 4927 |
| | 1 | TTGCAGG | | AGATGCA | |
| 28 | H55_(−26)- | GCATCTGAACATTTGGTCCTT | 4136 | CCCTGCAAAGGACCAAATGTT | 4928 |
| | 2 | TGCAGGG | | CAGATGC | |
| 28 | H55_(−25)- | CATCTGAACATTTGGTCCTTT | 4137 | ACCCTGCAAAGGACCAAATGT | 4929 |
| | 3 | GCAGGGT | | TCAGATG | |
| 28 | H55_(−24)- | ATCTGAACATTTGGTCCTTTG | 4138 | CACCCTGCAAAGGACCAAATG | 4930 |
| | 4 | CAGGGTG | | TTCAGAT | |
| 28 | H55_(−23)- | TCTGAACATTTGGTCCTTTGC | 4139 | TCACCCTGCAAAGGACCAAAT | 4931 |
| | 5 | AGGGTGA | | GTTCAGA | |
| 28 | H55_(−22)- | CTGAACATTTGGTCCTTTGCA | 4140 | CTCACCCTGCAAAGGACCAAA | 4932 |
| | 6 | GGGTGAG | | TGTTCAG | |
| 28 | H55_(−21)- | TGAACATTTGGTCCTTTGCAG | 4141 | ACTCACCCTGCAAAGGACCAA | 4933 |
| | 7 | GGTGAGT | | ATGTTCA | |
| 28 | H55_(−20)- | GAACATTTGGTCCTTTGCAGG | 4142 | CACTCACCCTGCAAAGGACCA | 4934 |
| | 8 | GTGAGTG | | AATGTTC | |
| 28 | H55_(−19)- | AACATTTGGTCCTTTGCAGGG | 4143 | TCACTCACCCTGCAAAGGACC | 4935 |
| | 9 | TGAGTGA | | AAATGTT | |
| 28 | H55_(−18)- | ACATTTGGTCCTTTGCAGGGT | 4144 | CTCACTCACCCTGCAAAGGAC | 4936 |
| | 10 | GAGTGAG | | CAAATGT | |
| 28 | 1155_(−17)- | CATTTGGTCCTTTGCAGGGTG | 4145 | GCTCACTCACCCTGCAAAGGA | 4937 |
| | 11 | AGTGAGC | | CCAAATG | |
| 28 | H55_(−16)- | ATTTGGTCCTTTGCAGGGTGA | 4146 | CGCTCACTCACCCTGCAAAGG | 4938 |
| | 12 | GTGAGCG | | ACCAAAT | |
| 28 | H55_(−15)- | TTTGGTCCTTTGCAGGGTGAG | 4147 | TCGCTCACTCACCCTGCAAAG | 4939 |
| | 13 | TGAGCGA | | GACCAAA | |
| 28 | H55_(−14)- | TTGGTCCTTTGCAGGGTGAGT | 4148 | CTCGCTCACTCACCCTGCAAA | 4940 |
| | 14 | GAGCGAG | | GGACCAA | |
| 28 | H55_(−13)- | TGGTCCTTTGCAGGGTGAGTG | 4149 | TCTCGCTCACTCACCCTGCAA | 4941 |
| | 15 | AGCGAGA | | AGGACCA | |
| 28 | H55_(−12)- | GGTCCTTTGCAGGGTGAGTGA | 4150 | CTCTCGCTCACTCACCCTGCA | 4942 |
| | 16 | GCGAGAG | | AAGGACC | |
| 28 | H55_(−11)- | GTCCTTTGCAGGGTGAGTGAG | 4151 | CCTCTCGCTCACTCACCCTGC | 4943 |
| | 17 | CGAGAGG | | AAAGGAC | |
| 28 | H55_(−10)- | TCCTTTGCAGGGTGAGTGAGC | 4152 | GCCTCTCGCTCACTCACCCTG | 4944 |
| | 18 | GAGAGGC | | CAAAGGA | |
| 28 | H55_(−9)- | CCTTTGCAGGGTGAGTGAGCG | 4153 | AGCCTCTCGCTCACTCACCCT | 4945 |
| | 19 | AGAGGCT | | GCAAAGG | |
| 28 | H55_(−8)- | CTTTGCAGGGTGAGTGAGCGA | 4154 | CAGCCTCTCGCTCACTCACCC | 4946 |
| | 20 | GAGGCTG | | TGCAAAG | |
| 28 | H55_(−7)- | TTTGCAGGGTGAGTGAGCGAG | 4155 | GCAGCCTCTCGCTCACTCACC | 4947 |
| | 21 | AGGCTGC | | CTGCAAA | |
| 28 | H55_(−6)- | TTGCAGGGTGAGTGAGCGAGA | 4156 | AGCAGCCTCTCGCTCACTCAC | 4948 |
| | 22 | GGCTGCT | | CCTGCAA | |
| 28 | H55_(−5)- | TGCAGGGTGAGTGAGCGAGAG | 4157 | AAGCAGCCTCTCGCTCACTCA | 4949 |
| | 23 | GCTGCTT | | CCCTGCA | |
| 28 | H55_(−4)- | GCAGGGTGAGTGAGCGAGAGG | 4158 | AAAGCAGCCTCTCGCTCACTC | 4950 |
| | 24 | CTGCTTT | | ACCCTGC | |
| 28 | H55_(−3)- | CAGGGTGAGTGAGCGAGAGGC | 4159 | CAAAGCAGCCTCTCGCTCACT | 4951 |
| | 25 | TGCTTTG | | CACCCTG | |
| 28 | H55_(−2)- | AGGGTGAGTGAGCGAGAGGCT | 4160 | CCAAAGCAGCCTCTCGCTCAC | 4952 |
| | 26 | GCTTTGG | | TCACCCT | |
| 28 | H55_(−1)- | GGGTGAGTGAGCGAGAGGCTG | 4161 | TCCAAAGCAGCCTCTCGCTCA | 4953 |
| | 27 | CTTTGGA | | CTCACCC | |
| 28 | H55_1-28 | GGTGAGTGAGCGAGAGGCTGC | 4162 | TTCCAAAGCAGCCTCTCGCTC | 4954 |
| | | TTTGGAA | | ACTCACC | |
| 28 | H55_2-29 | GTGAGTGAGCGAGAGGCTGCT | 4163 | CTTCCAAAGCAGCCTCTCGCT | 4955 |
| | | TTGGAAG | | CACTCAC | |
| 28 | H55_3-30 | TGAGTGAGCGAGAGGCTGCTT | 4164 | TCTTCCAAAGCAGCCTCTCGC | 4956 |
| | | TGGAAGA | | TCACTCA | |
| 28 | H55_4-31 | GAGTGAGCGAGAGGCTGCTTT | 4165 | TTCTTCCAAAGCAGCCTCTCG | 4957 |
| | | GGAAGAA | | CTCACTC | |
| 28 | H55_5-32 | AGTGAGCGAGAGGCTGCTTTG | 4166 | TTTCTTCCAAAGCAGCCTCTC | 4958 |
| | | GAAGAAA | | GCTCACT | |
| 28 | H55_6-33 | GTGAGCGAGAGGCTGCTTTGG | 4167 | GTTTCTTCCAAAGCAGCCTCT | 4959 |
| | | AAGAAAC | | CGCTCAC | |
| 28 | H55_7-34 | TGAGCGAGAGGCTGCTTTGGA | 4168 | AGTTTCTTCCAAAGCAGCCTC | 4960 |
| | | AGAAACT | | TCGCTCA | |
| 28 | H55_8-35 | GAGCGAGAGGCTGCTTTGGAA | 4169 | GAGTTTCTTCCAAAGCAGCCT | 4961 |
| | | GAAACTC | | CTCGCTC | |
| 28 | H55_9-36 | AGCGAGAGGCTGCTTTGGAAG | 4170 | TGAGTTTCTTCCAAAGCAGCC | 4962 |
| | | AAACTCA | | TCTCGCT | |
| 28 | H55_10-37 | GCGAGAGGCTGCTTTGGAAGA | 4171 | ATGAGTTTCTTCCAAAGCAGC | 4963 |
| | | AACTCAT | | CTCTCGC | |
| 28 | H55_11-38 | CGAGAGGCTGCTTTGGAAGAA | 4172 | TATGAGTTTCTTCCAAAGCAG | 4964 |
| | | ACTCATA | | CCTCTCG | |
| 28 | H55_12-39 | GAGAGGCTGCTTTGGAAGAAA | 4173 | CTATGAGTTTCTTCCAAAGCA | 4965 |
| | | CTCATAG | | GCCTCTC | |
| 28 | H55_13-40 | AGAGGCTGCTTTGGAAGAAAC | 4174 | TCTATGAGTTTCTTCCAAAGC | 4966 |
| | | TCATAGA | | AGCCTCT | |
| 28 | H55_14-41 | GAGGCTGCTTTGGAAGAAACT | 4175 | ATCTATGAGTTTCTTCCAAAG | 4967 |
| | | CATAGAT | | CAGCCTC | |
| 28 | H55_15-42 | AGGCTGCTTTGGAAGAAACTC | 4176 | AATCTATGAGTTTCTTCCAAA | 4968 |
| | | ATAGATT | | GCAGCCT | |
| 28 | H55_16-43 | GGCTGCTTTGGAAGAAACTCA | 4177 | TAATCTATGAGTTTCTTCCAA | 4969 |
| | | TAGATTA | | AGCAGCC | |
| 28 | H55_17-44 | GCTGCTTTGGAAGAAACTCAT | 4178 | GTAATCTATGAGTTTCTTCCA | 4970 |
| | | AGATTAC | | AAGCAGC | |
| 28 | H55_18-45 | CTGCTTTGGAAGAAACTCATA | 4179 | AGTAATCTATGAGTTTCTTCC | 4971 |
| | | GATTACT | | AAAGCAG | |
| 28 | H55_19-46 | TGCTTTGGAAGAAACTCATAG | 4180 | CAGTAATCTATGAGTTTCTTC | 4972 |
| | | ATTACTG | | CAAAGCA | |
| 28 | H55_20-47 | GCTTTGGAAGAAACTCATAGA | 4181 | GCAGTAATCTATGAGTTTCTT | 4973 |
| | | TTACTGC | | CCAAAGC | |
| 28 | H55_21-48 | CTTTGGAAGAAACTCATAGAT | 4182 | TGCAGTAATCTATGAGTTTCT | 4974 |
| | | TACTGCA | | TCCAAAG | |
| 28 | H55_22-49 | TTTGGAAGAAACTCATAGATT | 4183 | TTGCAGTAATCTATGAGTTTC | 4975 |
| | | ACTGCAA | | TTCCAAA | |
| 28 | H55_23-50 | TTGGAAGAAACTCATAGATTA | 4184 | GTTGCAGTAATCTATGAGTTT | 4976 |
| | | CTGCAAC | | CTTCCAA | |
| 28 | H55_24-51 | TGGAAGAAACTCATAGATTAC | 4185 | TGTTGCAGTAATCTATGAGTT | 4977 |
| | | TGCAACA | | TCTTCCA | |
| 29 | H55_(−32)- | ATAATTGCATCTGAACATTTG | 4186 | CAAAGGACCAAATGTTCAGAT | 4978 |
| | (−4) | GTCCTTTG | | GCAATTAT | |
| 29 | H55_(−31)- | TAATTGCATCTGAACATTTGG | 4187 | GCAAAGGACCAAATGTTCAGA | 4979 |
| | (−3) | TCCTTTGC | | TGCAATTA | |
| 29 | H55_(−30)- | AATTGCATCTGAACATTTGGT | 4188 | TGCAAAGGACCAAATGTTCAG | 4980 |
| | (−2) | CCTTTGCA | | ATGCAATT | |
| 29 | H55_(−29)- | ATTGCATCTGAACATTTGGTC | 4189 | CTGCAAAGGACCAAATGTTCA | 4981 |
| | (−1) | CTTTGCAG | | GATGCAAT | |
| 29 | H55_(−28)- | TTGCATCTGAACATTTGGTCC | 4190 | CCTGCAAAGGACCAAATGTTC | 4982 |
| | 1 | TTTGCAGG | | AGATGCAA | |
| 29 | H55_(−27)- | TGCATCTGAACATTTGGTCCT | 4191 | CCCTGCAAAGGACCAAATGTT | 4983 |
| | 2 | TTGCAGGG | | CAGATGCA | |
| 29 | H55_(−26)- | GCATCTGAACATTTGGTCCTT | 4192 | ACCCTGCAAAGGACCAAATGT | 4984 |
| | 3 | TGCAGGGT | | TCAGATGC | |
| 29 | H55_(−25)- | CATCTGAACATTTGGTCCTTT | 4193 | CACCCTGCAAAGGACCAAATG | 4985 |
| | 4 | GCAGGGTG | | TTCAGATG | |
| 29 | H55_(−24)- | ATCTGAACATTTGGTCCTTTG | 4194 | TCACCCTGCAAAGGACCAAAT | 4986 |
| | 5 | CAGGGTGA | | GTTCAGAT | |
| 29 | H55_(−23)- | TCTGAACATTTGGTCCTTTGC | 4195 | CTCACCCTGCAAAGGACCAAA | 4987 |
| | 6 | AGGGTGAG | | TGTTCAGA | |
| 29 | H55_(−22)- | CTGAACATTTGGTCCTTTGCA | 4196 | ACTCACCCTGCAAAGGACCAA | 4988 |
| | 7 | GGGTGAGT | | ATGTTCAG | |
| 29 | H55_(−21)- | TGAACATTTGGTCCTTTGCAG | 4197 | CACTCACCCTGCAAAGGACCA | 4989 |
| | 8 | GGTGAGTG | | AATGTTCA | |
| 29 | H55_(−20)- | GAACATTTGGTCCTTTGCAGG | 4198 | TCACTCACCCTGCAAAGGACC | 4990 |
| | 9 | GTGAGTGA | | AAATGTTC | |
| 29 | H55_(−19)- | AACATTTGGTCCTTTGCAGGG | 4199 | CTCACTCACCCTGCAAAGGAC | 4991 |
| | 10 | TGAGTGAG | | CAAATGTT | |
| 29 | H55_(−18)- | ACATTTGGTCCTTTGCAGGGT | 4200 | GCTCACTCACCCTGCAAAGGA | 4992 |
| | 11 | GAGTGAGC | | CCAAATGT | |
| 29 | H55_(−17)- | CATTTGGTCCTTTGCAGGGTG | 4201 | CGCTCACTCACCCTGCAAAGG | 4993 |
| | 12 | AGTGAGCG | | ACCAAATG | |
| 29 | H55_(−16)- | ATTTGGTCCTTTGCAGGGTGA | 4202 | TCGCTCACTCACCCTGCAAAG | 4994 |
| | 13 | GTGAGCGA | | GACCAAAT | |
| 29 | H55_(−15)- | TTTGGTCCTTTGCAGGGTGAG | 4203 | CTCGCTCACTCACCCTGCAAA | 4995 |
| | 14 | TGAGCGAG | | GGACCAAA | |
| 29 | H55_(−14)- | TTGGTCCTTTGCAGGGTGAGT | 4204 | TCTCGCTCACTCACCCTGCAA | 4996 |
| | 15 | GAGCGAGA | | AGGACCAA | |
| 29 | H55_(−13)- | TGGTCCTTTGCAGGGTGAGTG | 4205 | CTCTCGCTCACTCACCCTGCA | 4997 |
| | 16 | AGCGAGAG | | AAGGACCA | |
| 29 | H55_(−12)- | GGTCCTTTGCAGGGTGAGTGA | 4206 | CCTCTCGCTCACTCACCCTGC | 4998 |
| | 17 | GCGAGAGG | | AAAGGACC | |
| 29 | H55_(−11)- | GTCCTTTGCAGGGTGAGTGAG | 4207 | GCCTCTCGCTCACTCACCCTG | 4999 |
| | 18 | CGAGAGGC | | CAAAGGAC | |
| 29 | H55_(−10)- | TCCTTTGCAGGGTGAGTGAGC | 4208 | AGCCTCTCGCTCACTCACCCT | 5000 |
| | 19 | GAGAGGCT | | GCAAAGGA | |
| 29 | H55_(−9)- | CCTTTGCAGGGTGAGTGAGCG | 4209 | CAGCCTCTCGCTCACTCACCC | 5001 |
| | 20 | AGAGGCTG | | TGCAAAGG | |
| 29 | H55_(−8)- | CTTTGCAGGGTGAGTGAGCGA | 4210 | GCAGCCTCTCGCTCACTCACC | 5002 |
| | 21 | GAGGCTGC | | CTGCAAAG | |
| 29 | H55_(−7)- | TTTGCAGGGTGAGTGAGCGAG | 4211 | AGCAGCCTCTCGCTCACTCAC | 5003 |
| | 22 | AGGCTGCT | | CCTGCAAA | |
| 29 | H55_(−6)- | TTGCAGGGTGAGTGAGCGAGA | 4212 | AAGCAGCCTCTCGCTCACTCA | 5004 |
| | 23 | GGCTGCTT | | CCCTGCAA | |
| 29 | H55_(−5)- | TGCAGGGTGAGTGAGCGAGAG | 4213 | AAAGCAGCCTCTCGCTCACTC | 5005 |
| | 24 | GCTGCTTT | | ACCCTGCA | |
| 29 | H55_(−4)- | GCAGGGTGAGTGAGCGAGAGG | 4214 | CAAAGCAGCCTCTCGCTCACT | 5006 |
| | 25 | CTGCTTTG | | CACCCTGC | |
| 29 | H55_(−3)- | CAGGGTGAGTGAGCGAGAGGC | 4215 | CCAAAGCAGCCTCTCGCTCAC | 5007 |
| | 26 | TGCTTTGG | | TCACCCTG | |
| 29 | H55_(−2)- | AGGGTGAGTGAGCGAGAGGCT | 4216 | TCCAAAGCAGCCTCTCGCTCA | 5008 |
| | 27 | GCTTTGGA | | CTCACCCT | |
| 29 | H55_(−1)- | GGGTGAGTGAGCGAGAGGCTG | 4217 | TTCCAAAGCAGCCTCTCGCTC | 5009 |
| | 28 | CTTTGGAA | | ACTCACCC | |
| 29 | H55_1-29 | GGTGAGTGAGCGAGAGGCTGC | 4218 | CTTCCAAAGCAGCCTCTCGCT | 5010 |
| | | TTTGGAAG | | CACTCACC | |
| 29 | H55_2-30 | GTGAGTGAGCGAGAGGCTGCT | 4219 | TCTTCCAAAGCAGCCTCTCGC | 5011 |
| | | TTGGAAGA | | TCACTCAC | |
| 29 | H55_3-31 | TGAGTGAGCGAGAGGCTGCTT | 4220 | TTCTTCCAAAGCAGCCTCTCG | 5012 |
| | | TGGAAGAA | | CTCACTCA | |
| 29 | H55_4-32 | GAGTGAGCGAGAGGCTGCTTT | 4221 | TTTCTTCCAAAGCAGCCTCTC | 5013 |
| | | GGAAGAAA | | GCTCACTC | |
| 29 | H55_5-33 | AGTGAGCGAGAGGCTGCTTTG | 4222 | GTTTCTTCCAAAGCAGCCTCT | 5014 |
| | | GAAGAAAC | | CGCTCACT | |
| 29 | H55_6-34 | GTGAGCGAGAGGCTGCTTTGG | 4223 | AGTTTCTTCCAAAGCAGCCTC | 5015 |
| | | AAGAAACT | | TCGCTCAC | |
| 29 | H55_7-35 | TGAGCGAGAGGCTGCTTTGGA | 4224 | GAGTTTCTTCCAAAGCAGCCT | 5016 |
| | | AGAAACTC | | CTCGCTCA | |
| 29 | H55_8-36 | GAGCGAGAGGCTGCTTTGGAA | 4225 | TGAGTTTCTTCCAAAGCAGCC | 5017 |
| | | GAAACTCA | | TCTCGCTC | |
| 29 | H55_9-37 | AGCGAGAGGCTGCTTTGGAAG | 4226 | ATGAGTTTCTTCCAAAGCAGC | 5018 |
| | | AAACTCAT | | CTCTCGCT | |
| 29 | H55_10-38 | GCGAGAGGCTGCTTTGGAAGA | 4227 | TATGAGTTTCTTCCAAAGCAG | 5019 |
| | | AACTCATA | | CCTCTCGC | |
| 29 | H55_11-39 | CGAGAGGCTGCTTTGGAAGAA | 4228 | CTATGAGTTTCTTCCAAAGCA | 5020 |
| | | ACTCATAG | | GCCTCTCG | |
| 29 | H55_12-40 | GAGAGGCTGCTTTGGAAGAAA | 4229 | TCTATGAGTTTCTTCCAAAGC | 5021 |
| | | CTCATAGA | | AGCCTCTC | |
| 29 | H55_13-41 | AGAGGCTGCTTTGGAAGAAAC | 4230 | ATCTATGAGTTTCTTCCAAAG | 5022 |
| | | TCATAGAT | | CAGCCTCT | |
| 29 | H55_14-42 | GAGGCTGCTTTGGAAGAAACT | 4231 | AATCTATGAGTTTCTTCCAAA | 5023 |
| | | CATAGATT | | GCAGCCTC | |
| 29 | H55_15-43 | AGGCTGCTTTGGAAGAAACTC | 4232 | TAATCTATGAGTTTCTTCCAA | 5024 |
| | | ATAGATTA | | AGCAGCCT | |
| 29 | H55_16-44 | GGCTGCTTTGGAAGAAACTCA | 4233 | GTAATCTATGAGTTTCTTCCA | 5025 |
| | | TAGATTAC | | AAGCAGCC | |
| 29 | H55_17-45 | GCTGCTTTGGAAGAAACTCAT | 4234 | AGTAATCTATGAGTTTCTTCC | 5026 |
| | | AGATTACT | | AAAGCAGC | |
| 29 | H55_18-46 | CTGCTTTGGAAGAAACTCATA | 4235 | CAGTAATCTATGAGTTTCTTC | 5027 |
| | | GATTACTG | | CAAAGCAG | |
| 29 | H55_19-47 | TGCTTTGGAAGAAACTCATAG | 4236 | GCAGTAATCTATGAGTTTCTT | 5028 |
| | | ATTACTGC | | CCAAAGCA | |
| 29 | H55_20-48 | GCTTTGGAAGAAACTCATAGA | 4237 | TGCAGTAATCTATGAGTTTCT | 5029 |
| | | TTACTGCA | | TCCAAAGC | |
| 29 | H55_21-49 | CTTTGGAAGAAACTCATAGAT | 4238 | TTGCAGTAATCTATGAGTTTC | 5030 |
| | | TACTGCAA | | TTCCAAAG | |
| 29 | H55_22-50 | TTTGGAAGAAACTCATAGATT | 4239 | GTTGCAGTAATCTATGAGTTT | 5031 |
| | | ACTGCAAC | | CTTCCAAA | |
| 29 | H55_23-51 | TTGGAAGAAACTCATAGATTA | 4240 | TGTTGCAGTAATCTATGAGTT | 5032 |
| | | CTGCAACA | | TCTTCCAA | |
| 29 | H55_24-52 | TGGAAGAAACTCATAGATTAC | 4241 | CTGTTGCAGTAATCTATGAGT | 5033 |
| | | TGCAACAG | | TTCTTCCA | |
| 30 | H55_(−33)- | AATAATTGCATCTGAACATTT | 4242 | CAAAGGACCAAATGTTCAGAT | 5034 |
| | (−4) | GGTCCTTTG | | GCAATTATT | |
| 30 | H55_(−32)- | ATAATTGCATCTGAACATTTG | 4243 | GCAAAGGACCAAATGTTCAGA | 5035 |
| | (−3) | GTCCTTTGC | | TGCAATTAT | |
| 30 | H55_(−31)- | TAATTGCATCTGAACATTTGG | 4244 | TGCAAAGGACCAAATGTTCAG | 5036 |
| | (−2) | TCCTTTGCA | | ATGCAATTA | |
| 30 | H55_(−30)- | AATTGCATCTGAACATTTGGT | 4245 | CTGCAAAGGACCAAATGTTCA | 5037 |
| | (−1) | CCTTTGCAG | | GATGCAATT | |
| 30 | H55_(−29)- | ATTGCATCTGAACATTTGGTC | 4246 | CCTGCAAAGGACCAAATGTTC | 5038 |
| | 1 | CTTTGCAGG | | AGATGCAAT | |
| 30 | H55_(−28)- | TTGCATCTGAACATTTGGTCC | 4247 | CCCTGCAAAGGACCAAATGTT | 5039 |
| | 2 | TTTGCAGGG | | CAGATGCAA | |
| 30 | H55_(−27)- | TGCATCTGAACATTTGGTCCT | 4248 | ACCCTGCAAAGGACCAAATGT | 5040 |
| | 3 | TTGCAGGGT | | TCAGATGCA | |
| 30 | H55_(−26)- | GCATCTGAACATTTGGTCCTT | 4249 | CACCCTGCAAAGGACCAAATG | 5041 |
| | 4 | TGCAGGGTG | | TTCAGATGC | |
| 30 | H55_(−25)- | CATCTGAACATTTGGTCCTTT | 4250 | TCACCCTGCAAAGGACCAAAT | 5042 |
| | 5 | GCAGGGTGA | | GTTCAGATG | |
| 30 | H55_(−24)- | ATCTGAACATTTGGTCCTTTG | 4251 | CTCACCCTGCAAAGGACCAAA | 5043 |
| | 6 | CAGGGTGAG | | TGTTCAGAT | |
| 30 | H55_(−23)- | TCTGAACATTTGGTCCTTTGC | 4252 | ACTCACCCTGCAAAGGACCAA | 5044 |
| | 7 | AGGGTGAGT | | ATGTTCAGA | |
| 30 | H55_(−22)- | CTGAACATTTGGTCCTTTGCA | 4253 | CACTCACCCTGCAAAGGACCA | 5045 |
| | 8 | GGGTGAGTG | | AATGTTCAG | |
| 30 | H55_(−21)- | TGAACATTTGGTCCTTTGCAG | 4254 | TCACTCACCCTGCAAAGGACC | 5046 |
| | 9 | GGTGAGTGA | | AAATGTTCA | |
| 30 | H55_(−20)- | GAACATTTGGTCCTTTGCAGG | 4255 | CTCACTCACCCTGCAAAGGAC | 5047 |
| | 10 | GTGAGTGAG | | CAAATGTTC | |
| 30 | H55_(−19)- | AACATTTGGTCCTTTGCAGGG | 4256 | GCTCACTCACCCTGCAAAGGA | 5048 |
| | 11 | TGAGTGAGC | | CCAAATGTT | |
| 30 | H55_(−18)- | ACATTTGGTCCTTTGCAGGGT | 4257 | CGCTCACTCACCCTGCAAAGG | 5049 |
| | 12 | GAGTGAGCG | | ACCAAATGT | |
| 30 | H55_(−17)- | CATTTGGTCCTTTGCAGGGTG | 4258 | TCGCTCACTCACCCTGCAAAG | 5050 |
| | 13 | AGTGAGCGA | | GACCAAATG | |
| 30 | H55_(−16)- | ATTTGGTCCTTTGCAGGGTGA | 4259 | CTCGCTCACTCACCCTGCAAA | 5051 |
| | 14 | GTGAGCGAG | | GGACCAAAT | |
| 30 | H55_(−15)- | TTTGGTCCTTTGCAGGGTGAG | 4260 | TCTCGCTCACTCACCCTGCAA | 5052 |
| | 15 | TGAGCGAGA | | AGGACCAAA | |
| 30 | H55_(−14)- | TTGGTCCTTTGCAGGGTGAGT | 4261 | CTCTCGCTCACTCACCCTGCA | 5053 |
| | 16 | GAGCGAGAG | | AAGGACCAA | |
| 30 | H55_(−13)- | TGGTCCTTTGCAGGGTGAGTG | 4262 | CCTCTCGCTCACTCACCCTGC | 5054 |
| | 17 | AGCGAGAGG | | AAAGGACCA | |
| 30 | H55_(−12)- | GGTCCTTTGCAGGGTGAGTGA | 4263 | GCCTCTCGCTCACTCACCCTG | 5055 |
| | 18 | GCGAGAGGC | | CAAAGGACC | |
| 30 | H55_(−11)- | GTCCTTTGCAGGGTGAGTGAG | 4264 | AGCCTCTCGCTCACTCACCCT | 5056 |
| | 19 | CGAGAGGCT | | GCAAAGGAC | |
| 30 | H55_(−10)- | TCCTTTGCAGGGTGAGTGAGC | 4265 | CAGCCTCTCGCTCACTCACCC | 5057 |
| | 20 | GAGAGGCTG | | TGCAAAGGA | |
| 30 | H55_(−9)- | CCTTTGCAGGGTGAGTGAGCG | 4266 | GCAGCCTCTCGCTCACTCACC | 5058 |
| | 21 | AGAGGCTGC | | CTGCAAAGG | |
| 30 | H55_(−8)- | CTTTGCAGGGTGAGTGAGCGA | 4267 | AGCAGCCTCTCGCTCACTCAC | 5059 |
| | 22 | GAGGCTGCT | | CCTGCAAAG | |
| 30 | H55_(−7)- | TTTGCAGGGTGAGTGAGCGAG | 4268 | AAGCAGCCTCTCGCTCACTCA | 5060 |
| | 23 | AGGCTGCTT | | CCCTGCAAA | |
| 30 | HI55_(−6)- | TTGCAGGGTGAGTGAGCGAGA | 4269 | AAAGCAGCCTCTCGCTCACTC | 5061 |
| | 24 | GGCTGCTTT | | ACCCTGCAA | |
| 30 | H55_(−5)- | TGCAGGGTGAGTGAGCGAGAG | 4270 | CAAAGCAGCCTCTCGCTCACT | 5062 |
| | 25 | GCTGCTTTG | | CACCCTGCA | |
| 30 | H55_(−4)- | GCAGGGTGAGTGAGCGAGAGG | 4271 | CCAAAGCAGCCTCTCGCTCAC | 5063 |
| | 26 | CTGCTTTGG | | TCACCCTGC | |
| 30 | H55_(−3)- | CAGGGTGAGTGAGCGAGAGGC | 4272 | TCCAAAGCAGCCTCTCGCTCA | 5064 |
| | 27 | TGCTTTGGA | | CTCACCCTG | |
| 30 | H55_(−2)- | AGGGTGAGTGAGCGAGAGGCT | 4273 | TTCCAAAGCAGCCTCTCGCTC | 5065 |
| | 28 | GCTTTGGAA | | ACTCACCCT | |
| 30 | H55_(−1)- | GGGTGAGTGAGCGAGAGGCTG | 4274 | CTTCCAAAGCAGCCTCTCGCT | 5066 |
| | 29 | CTTTGGAAG | | CACTCACCC | |
| 30 | H55_1-30 | GGTGAGTGAGCGAGAGGCTGC | 4275 | TCTTCCAAAGCAGCCTCTCGC | 5067 |
| | | TTTGGAAGA | | TCACTCACC | |
| 30 | H55_2-31 | GTGAGTGAGCGAGAGGCTGCT | 4276 | TTCTTCCAAAGCAGCCTCTCG | 5068 |
| | | TTGGAAGAA | | CTCACTCAC | |
| 30 | H55_3-32 | TGAGTGAGCGAGAGGCTGCTT | 4277 | TTTCTTCCAAAGCAGCCTCTC | 5069 |
| | | TGGAAGAAA | | GCTCACTCA | |
| 30 | H55_4-33 | GAGTGAGCGAGAGGCTGCTTT | 4278 | GTTTCTTCCAAAGCAGCCTCT | 5070 |
| | | GGAAGAAAC | | CGCTCACTC | |
| 30 | H55_5-34 | AGTGAGCGAGAGGCTGCTTTG | 4279 | AGTTTCTTCCAAAGCAGCCTC | 5071 |
| | | GAAGAAACT | | TCGCTCACT | |
| 30 | H55_6-35 | GTGAGCGAGAGGCTGCTTTGG | 4280 | GAGTTTCTTCCAAAGCAGCCT | 5072 |
| | | AAGAAACTC | | CTCGCTCAC | |
| 30 | H55_7-36 | TGAGCGAGAGGCTGCTTTGGA | 4281 | TGAGTTTCTTCCAAAGCAGCC | 5073 |
| | | AGAAACTCA | | TCTCGCTCA | |
| 30 | H55_8-37 | GAGCGAGAGGCTGCTTTGGAA | 4282 | ATGAGTTTCTTCCAAAGCAGC | 5074 |
| | | GAAACTCAT | | CTCTCGCTC | |
| 30 | H55_9-38 | AGCGAGAGGCTGCTTTGGAAG | 4283 | TATGAGTTTCTTCCAAAGCAG | 5075 |
| | | AAACTCATA | | CCTCTCGCT | |
| 30 | H55_10-39 | GCGAGAGGCTGCTTTGGAAGA | 4284 | CTATGAGTTTCTTCCAAAGCA | 5076 |
| | | AACTCATAG | | GCCTCTCGC | |
| 30 | H55_11-40 | CGAGAGGCTGCTTTGGAAGAA | 4285 | TCTATGAGTTTCTTCCAAAGC | 5077 |
| | | ACTCATAGA | | AGCCTCTCG | |
| 30 | H55_12-41 | GAGAGGCTGCTTTGGAAGAAA | 4286 | ATCTATGAGTTTCTTCCAAAG | 5078 |
| | | CTCATAGAT | | CAGCCTCTC | |
| 30 | H55_13-42 | AGAGGCTGCTTTGGAAGAAAC | 4287 | AATCTATGAGTTTCTTCCAAA | 5079 |
| | | TCATAGATT | | GCAGCCTCT | |
| 30 | H55_14-43 | GAGGCTGCTTTGGAAGAAACT | 4288 | TAATCTATGAGTTTCTTCCAA | 5080 |
| | | CATAGATTA | | AGCAGCCTC | |
| 30 | H55_15-44 | AGGCTGCTTTGGAAGAAACTC | 4289 | GTAATCTATGAGTTTCTTCCA | 5081 |
| | | ATAGATTAC | | AAGCAGCCT | |
| 30 | H55_16-45 | GGCTGCTTTGGAAGAAACTCA | 4290 | AGTAATCTATGAGTTTCTTCC | 5082 |
| | | TAGATTACT | | AAAGCAGCC | |
| 30 | H55_17-46 | GCTGCTTTGGAAGAAACTCAT | 4291 | CAGTAATCTATGAGTTTCTTC | 5083 |
| | | AGATTACTG | | CAAAGCAGC | |
| 30 | H55_18-47 | CTGCTTTGGAAGAAACTCATA | 4292 | GCAGTAATCTATGAGITTCTT | 5084 |
| | | GATTACTGC | | CCAAAGCAG | |
| 30 | H55_19-48 | TGCTTTGGAAGAAACTCATAG | 4293 | TGCAGTAATCTATGAGTTTCT | 5085 |
| | | ATTACTGCA | | TCCAAAGCA | |
| 30 | H55_20-49 | GCTTTGGAAGAAACTCATAGA | 4294 | TTGCAGTAATCTATGAGTTTC | 5086 |
| | | TTACTGCAA | | TTCCAAAGC | |
| 30 | H55_21-50 | CTTTGGAAGAAACTCATAGAT | 4295 | GTTGCAGTAATCTATGAGTTT | 5087 |
| | | TACTGCAAC | | CTTCCAAAG | |
| 30 | H55_22-51 | TTTGGAAGAAACTCATAGATT | 4296 | TGTTGCAGTAATCTATGAGTT | 5088 |
| | | ACTGCAACA | | TCTTCCAAA | |
| 30 | H55_23-52 | TTGGAAGAAACTCATAGATTA | 4297 | CTGTTGCAGTAATCTATGAGT | 5089 |
| | | CTGCAACAG | | TTCTTCCAA | |
| 30 | H55_24-53 | TGGAAGAAACTCATAGATTAC | 4298 | ACTGTTGCAGTAATCTATGAG | 5090 |
| | | TGCAACAGT | | TTTCTTCCA | |

[0424] In one embodiment, the second antisense oligomer of the present invention comprises a base sequence complementary to:
[0425] (a) any one base sequence selected from the group consisting of SEQ ID NOs: 3507 to 4298;
[0426] (b) a base sequence that hybridizes under stringent conditions to a base sequence complementary to any one base sequence selected from the group consisting of SEQ ID NOs: 3507 to 4298;
[0427] (c) a base sequence that has at least 85% identity with any one base sequence selected from the group consisting of SEQ ID NOs: 3507 to 4298, and has a length within ±15% of the length of the any one base sequence selected; or
[0428] (d) a partial base sequence of any one base sequence selected from the group consisting of the base sequences (a), (b), and (c).

[0429] Herein, the base sequence (c) is a mutant type of the base sequence (a), and examples of such a mutant type also include:
[0430] (c-1) a base sequence that has at least 85% identity with any one base sequence selected from the group consisting of SEQ ID NOs: 3507 to 4298, and has a length within ±15% of the length of the any one base sequence selected,
[0431] (c-2) a base sequence that has at least 86% identity with any one base sequence selected from the group consisting of SEQ ID NOs: 3507 to 4298, and has a length within ±14% of the length of the any one base sequence selected,
[0432] (c-3) a base sequence that has at least 87% identity with any one base sequence selected from the group consisting of SEQ ID NOs: 3507 to 4298, and has a length within #13% of the length of the any one base sequence selected,
[0433] (c-4) a base sequence that has at least 88% identity with any one base sequence selected from the group consisting of SEQ ID NOs: 3507 to 4298, and has a length within ±12% of the length of the any one base sequence selected,
[0434] (c-5) a base sequence that has at least 89% identity with any one base sequence selected from the group consisting of SEQ ID NOs: 3507 to 4298, and has a length within ±11% of the length of the any one base sequence selected,
[0435] (c-6) a base sequence that has at least 90% identity with any one base sequence selected from the group consisting of SEQ ID NOs: 3507 to 4298, and has a length within ±10% of the length of the any one base sequence selected,
[0436] (c-7) a base sequence that has at least 91% identity with any one base sequence selected from the group consisting of SEQ ID NOs: 3507 to 4298, and has a length within ±9% of the length of the any one base sequence selected,
[0437] (c-8) a base sequence that has at least 92% identity with any one base sequence selected from the group consisting of SEQ ID NOs: 3507 to 4298, and has a length within ±8% of the length of the any one base sequence selected,
[0438] (c-9) a base sequence that has at least 93% identity with any one base sequence selected from the group consisting of SEQ ID NOS: 3507 to 4298, and has a length within ±7% of the length of the any one base sequence selected,
[0439] (c-10) a base sequence that has at least 94% identity with any one base sequence selected from the group consisting of SEQ ID NOs: 3507 to 4298, and has a length within ±6% of the length of the any one base sequence selected,
[0440] (c-11) a base sequence that has at least 95% identity with any one base sequence selected from the group consisting of SEQ ID NOs: 3507 to 4298, and has a length within ±5% of the length of the any one base sequence selected,
[0441] (c-12) a base sequence that has at least 96% identity with any one base sequence selected from the group consisting of SEQ ID NOs: 3507 to 4298, and has a length within ±4% of the length of the any one base sequence selected,
[0442] (c-13) a base sequence that has at least 97% identity with any one base sequence selected from the group consisting of SEQ ID NOs: 3507 to 4298, and has a length within ±3% of the length of the any one base sequence selected,
[0443] (c-14) a base sequence that has at least 98% identity with any one base sequence selected from the group consisting of SEQ ID NOs: 3507 to 4298, and has a length within ±2% of the length of the any one base sequence selected,
[0444] (c-15) a base sequence that has at least 99% identity with any one base sequence selected from the group consisting of SEQ ID NOs: 3507 to 4298, and has a length within ±1% of the length of the any one base sequence selected, and
[0445] (c-16) a base sequence that has at least 99.5% identity with any one base sequence selected from the group consisting of SEQ ID NOs: 3507 to 4298, and has a length within ±0.5% of the length of the any one base sequence selected.

[0446] In one embodiment, the second antisense oligomer of the present invention comprises or consists of:
[0447] (a) any one base sequence selected from the group consisting of SEQ ID NOs: 4299 to 5090; or
[0448] (b) a base sequence that has at least 85% identity with any one base sequence selected from the group consisting of SEQ ID NOs: 4299 to 5090, and has a length within ±15% of the length of the any one base sequence selected.

[0449] Herein, the base sequence (b) is a mutant type of the base sequence (a), and examples of such a mutant type also include:
[0450] (b-1) a base sequence that has at least 85% identity with any one base sequence selected from the group consisting of SEQ ID NOs: 4299 to 5090, and has a length within ±15% of the length of the any one base sequence selected,
[0451] (b-2) a base sequence that has at least 86% identity with any one base sequence selected from the group consisting of SEQ ID NOs: 4299 to 5090, and has a length within ±14% of the length of the any one base sequence selected,
[0452] (b-3) a base sequence that has at least 87% identity with any one base sequence selected from the group consisting of SEQ ID NOs: 4299 to 5090, and has a length within ±13% of the length of the any one base sequence selected,
[0453] (b-4) a base sequence that has at least 88% identity with any one base sequence selected from the group consisting of SEQ ID NOs: 4299 to 5090, and has a length within ±12% of the length of the any one base sequence selected,
[0454] (b-5) a base sequence that has at least 89% identity with any one base sequence selected from the group consisting of SEQ ID NOS: 4299 to 5090, and has a length within ±11% of the length of the any one base sequence selected,
[0455] (b-6) a base sequence that has at least 90% identity with any one base sequence selected from the group consisting of SEQ ID NOs: 4299 to 5090, and has a length within ±10% of the length of the any one base sequence selected,
[0456] (b-7) a base sequence that has at least 91% identity with any one base sequence selected from the group consisting of SEQ ID NOs: 4299 to 5090, and has a length within ±9% of the length of the any one base sequence selected,
[0457] (b-8) a base sequence that has at least 92% identity with any one base sequence selected from the group consisting of SEQ ID NOs: 4299 to 5090, and has a length within ±8% of the length of the any one base sequence selected,
[0458] (b-9) a base sequence that has at least 93% identity with any one base sequence selected from the group consisting of SEQ ID NOs: 4299 to 5090, and has a length within ±7% of the length of the any one base sequence selected,
[0459] (b-10) a base sequence that has at least 94% identity with any one base sequence selected from the group consisting of SEQ ID NOs: 4299 to 5090, and has a length within ±6% of the length of the any one base sequence selected,
[0460] (b-11) a base sequence that has at least 95% identity with any one base sequence selected from the group consisting of SEQ ID NOS: 4299 to 5090, and has a length within ±5% of the length of the any one base sequence selected,
[0461] (b-12) a base sequence that has at least 96% identity with any one base sequence selected from the group consisting of SEQ ID NOs: 4299 to 5090, and has a length within ±4% of the length of the any one base sequence selected,
[0462] (b-13) a base sequence that has at least 97% identity with any one base sequence selected from the group consisting of SEQ ID NOs: 4299 to 5090, and has a length within ±3% of the length of the any one base sequence selected,
[0463] (b-14) a base sequence that has at least 98% identity with any one base sequence selected from the group consisting of SEQ ID NOs: 4299 to 5090, and has a length within ±2% of the length of the any one base sequence selected,
[0464] (b-15) a base sequence that has at least 99% identity with any one base sequence selected from the group consisting of SEQ ID NOs: 4299 to 5090, and has a length within ±1% of the length of the any one base sequence selected, and
[0465] (b-16) a base sequence that has at least 99.5% identity with any one base sequence selected from the group consisting of SEQ ID NOs: 4299 to 5090, and has a length within ±0.5% of the length of the any one base sequence selected.

[0466] In one embodiment, the second antisense oligomer of the present invention comprises or consists of any one base sequence selected from the group consisting of SEQ ID Nos: 4299 to 5090.

[0467] In one embodiment, the second antisense oligomer comprises or consists of any one base sequence selected from the group consisting of SEQ ID NOs: 4698, 4702, 4752, 4923, 4926, 4936, 4950, and 4977.

[0468] Table 7 below shows examples of the target sequence of the third antisense oligomer of the present invention, and a complementary sequence (antisense sequence) thereof.

TABLE 7

| | | | SEQ | | SEQ |
|---|---|---|---|---|---|
| Length | Target | | ID | Antisense sequence | ID |
| mer | site | Target sequence | NO: | (5′ to 3′) | NO: |
| 15 | H45_ | AAAAAGAGGTAGGGC | 1603 | GCCCTACCTCTTTTT | 2555 |
| | 169-183 | | | | |
| 15 | H45_ | AAAAGAGGTAGGGCG | 1604 | CGCCCTACCTCTTTT | 2556 |
| | 170-184 | | | | |
| 15 | H45_ | AAAGAGGTAGGGCGA | 1605 | TCGCCCTACCTCTTT | 2557 |
| | 171-185 | | | | |
| 15 | H45_ | AAGAGGTAGGGCGAC | 1606 | GTCGCCCTACCTCTT | 2558 |
| | 172-186 | | | | |
| 15 | H45_ | AGAGGTAGGGCGACA | 1607 | TGTCGCCCTACCTCT | 2559 |
| | 173-187 | | | | |
| 15 | H45_ | GAGGTAGGGCGACAG | 1608 | CTGTCGCCCTACCTC | 2560 |
| | 174-188 | | | | |
| 15 | H45_ | AGGTAGGGCGACAGA | 1609 | TCTGTCGCCCTACCT | 2561 |
| | 175-189 | | | | |
| 15 | H45_ | GGTAGGGCGACAGAT | 1610 | ATCTGTCGCCCTACC | 2562 |
| | 176-190 | | | | |
| 15 | H45_ | GTAGGGCGACAGATC | 1611 | GATCTGTCGCCCTAC | 2563 |
| | 177-191 | | | | |
| 15 | H45_ | TAGGGCGACAGATCT | 1612 | AGATCTGTCGCCCTA | 2564 |
| | 178-192 | | | | |
| 15 | H45_ | AGGGCGACAGATCTA | 1613 | TAGATCTGTCGCCCT | 2565 |
| | 179-193 | | | | |
| 15 | H45_ | GGGCGACAGATCTAA | 1614 | TTAGATCTGTCGCCC | 2566 |
| | 180-194 | | | | |
| 15 | H45_ | GGCGACAGATCTAAT | 1615 | ATTAGATCTGTCGCC | 2567 |
| | 181-195 | | | | |
| 15 | H45_ | GCGACAGATCTAATA | 1616 | TATTAGATCTGTCGC | 2568 |
| | 182-196 | | | | |
| 15 | H45_ | CGACAGATCTAATAG | 1617 | CTATTAGATCTGTCG | 2569 |
| | 183-197 | | | | |
| 15 | H45_ | GACAGATCTAATAGG | 1618 | CCTATTAGATCTGTC | 2570 |
| | 184-198 | | | | |
| 15 | H45_ | ACAGATCTAATAGGA | 1619 | TCCTATTAGATCTGT | 2571 |
| | 185-199 | | | | |
| 15 | H45_ | CAGATCTAATAGGAA | 1620 | TTCCTATTAGATCTG | 2572 |
| | 186-200 | | | | |
| 15 | H45_ | AGATCTAATAGGAAT | 1621 | ATTCCTATTAGATCT | 2573 |
| | 187-201 | | | | |
| 15 | H45_ | GATCTAATAGGAATG | 1622 | CATTCCTATTAGATC | 2574 |
| | 188-202 | | | | |
| 15 | H45_ | ATCTAATAGGAATGA | 1623 | TCATTCCTATTAGAT | 2575 |
| | 189-203 | | | | |
| 15 | H45_ | TCTAATAGGAATGAA | 1624 | TTCATTCCTATTAGA | 2576 |
| | 190-204 | | | | |
| 15 | H45_ | CTAATAGGAATGAAA | 1625 | TTTCATTCCTATTAG | 2577 |
| | 191-205 | | | | |
| 15 | H45_ | TAATAGGAATGAAAA | 1626 | TTTTCATTCCTATTA | 2578 |
| | 192-206 | | | | |
| 15 | H45_ | AATAGGAATGAAAAC | 1627 | GTTTTCATTCCTATT | 2579 |
| | 193-207 | | | | |
| 15 | H45_ | ATAGGAATGAAAACA | 1628 | TGTTTTCATTCCTAT | 2580 |
| | 194-208 | | | | |
| 15 | H45_ | TAGGAATGAAAACAT | 1629 | ATGTTTTCATTCCTA | 2581 |
| | 195-209 | | | | |
| 15 | H45_ | AGGAATGAAAACATT | 1630 | AATGTTTTCATTCCT | 2582 |
| | 196-210 | | | | |
| 15 | H45_ | GGAATGAAAACATTT | 1631 | AAATGTTTTCATTCC | 2583 |
| | 197-211 | | | | |
| 15 | H45_ | GAATGAAAACATTTT | 1632 | AAAATGTTTTCATTC | 2584 |
| | 198-212 | | | | |
| 15 | H45_ | AATGAAAACATTTTA | 1633 | TAAAATGTTTTCATT | 2585 |
| | 199-213 | | | | |
| 15 | H45_ | ATGAAAACATTTTAG | 1634 | CTAAAATGTTTTCAT | 2586 |
| | 200-214 | | | | |
| 15 | H45_ | TGAAAACATTTTAGC | 1635 | GCTAAAATGTTTTCA | 2587 |
| | 201-215 | | | | |
| 15 | H45_ | GAAAACATTTTAGCA | 1636 | TGCTAAAATGTTTTC | 2588 |
| | 202-216 | | | | |
| 15 | H45_ | AAAACATTTTAGCAG | 1637 | CTGCTAAAATGTTTT | 2589 |
| | 203-217 | | | | |
| 15 | H45_ | AAACATTTTAGCAGA | 1638 | TCTGCTAAAATGTTT | 2590 |
| | 204-218 | | | | |
| 15 | H45_ | AACATTTTAGCAGAC | 1639 | GTCTGCTAAAATGTT | 2591 |
| | 205-219 | | | | |
| 15 | H45_ | ACATTTTAGCAGACT | 1640 | AGTCTGCTAAAATGT | 2592 |
| | 206-220 | | | | |
| 15 | H45_ | CATTTTAGCAGACTT | 1641 | AAGTCTGCTAAAATG | 2593 |
| | 207-221 | | | | |
| 15 | H45_ | ATTTTAGCAGACTTT | 1642 | AAAGTCTGCTAAAAT | 2594 |
| | 208-222 | | | | |
| 15 | H45_ | TTTTAGCAGACTTTT | 1643 | AAAAGTCTGCTAAAA | 2595 |
| | 209-223 | | | | |
| 15 | H45_ | TTTAGCAGACTTTTT | 1644 | AAAAAGTCTGCTAAA | 2596 |
| | 210-224 | | | | |
| 15 | H45_ | TTAGCAGACTTTTTA | 1645 | TAAAAAGTCTGCTAA | 2597 |
| | 211-225 | | | | |
| 15 | H45_ | TAGCAGACTTTTTAA | 1646 | TTAAAAAGTCTGCTA | 2598 |
| | 212-226 | | | | |
| 15 | H45_ | AGCAGACTTTTTAAG | 1647 | CTTAAAAAGTCTGCT | 2599 |
| | 213-227 | | | | |
| 15 | H45_ | GCAGACTTTTTAAGC | 1648 | GCTTAAAAAGTCTGC | 2600 |
| | 214-228 | | | | |
| 15 | H45_ | CAGACTTTTTAAGCT | 1649 | AGCTTAAAAAGTCTG | 2601 |
| | 215-229 | | | | |
| 15 | H45_ | AGACTTTTTAAGCTT | 1650 | AAGCTTAAAAAGTCT | 2602 |
| | 216-230 | | | | |
| 15 | H45_ | GACTTTTTAAGCTTT | 1651 | AAAGCTTAAAAAGTC | 2603 |
| | 217-231 | | | | |
| 15 | H45_ | ACTTTTTAAGCTTTC | 1652 | GAAAGCTTAAAAAGT | 2604 |
| | 218-232 | | | | |
| 15 | H45_ | CTTTTTAAGCTTTCT | 1653 | AGAAAGCTTAAAAAG | 2605 |
| | 219-233 | | | | |
| 15 | H45_ | TTTTTAAGCTTTCTT | 1654 | AAGAAAGCTTAAAAA | 2606 |
| | 220-234 | | | | |
| 16 | H45_ | AAAAAAGAGGTAGGGC | 1655 | GCCCTACCTCTTTTTT | 2607 |
| | 168-183 | | | | |
| 16 | H45_ | AAAAAGAGGTAGGGCG | 1656 | CGCCCTACCTCTTTTT | 2608 |
| | 169-184 | | | | |
| 16 | H45_ | AAAAGAGGTAGGGCGA | 1657 | TCGCCCTACCTCTTTT | 2609 |
| | 170-185 | | | | |
| 16 | H45_ | AAAGAGGTAGGGCGAC | 1658 | GTCGCCCTACCTCTTT | 2610 |
| | 171-186 | | | | |
| 16 | H45_ | AAGAGGTAGGGCGACA | 1659 | TGTCGCCCTACCTCTT | 2611 |
| | 172-187 | | | | |
| 16 | H45_ | AGAGGTAGGGCGACAG | 1660 | CTGTCGCCCTACCTCT | 2612 |
| | 173-188 | | | | |
| 16 | H45_ | GAGGTAGGGCGACAGA | 1661 | TCTGTCGCCCTACCTC | 2613 |
| | 174-189 | | | | |
| 16 | H45_ | AGGTAGGGCGACAGAT | 1662 | ATCTGTCGCCCTACCT | 2614 |
| | 175-190 | | | | |
| 16 | H45_ | GGTAGGGCGACAGATC | 1663 | GATCTGTCGCCCTACC | 2615 |
| | 176-191 | | | | |
| 16 | H45_ | GTAGGGCGACAGATCT | 1664 | AGATCTGTCGCCCTAC | 2616 |
| | 177-192 | | | | |
| 16 | H45_ | TAGGGCGACAGATCTA | 1665 | TAGATCTGTCGCCCTA | 2617 |
| | 178-193 | | | | |
| 16 | H45_ | AGGGCGACAGATCTAA | 1666 | TTAGATCTGTCGCCCT | 2618 |
| | 179-194 | | | | |
| 16 | H45_ | GGGCGACAGATCTAAT | 1667 | ATTAGATCTGTCGCCC | 2619 |
| | 180-195 | | | | |
| 16 | H45_ | GGCGACAGATCTAATA | 1668 | TATTAGATCTGTCGCC | 2620 |
| | 181-196 | | | | |
| 16 | H45_ | GCGACAGATCTAATAG | 1669 | CTATTAGATCTGTCGC | 2621 |
| | 182-197 | | | | |
| 16 | H45_ | CGACAGATCTAATAGG | 1670 | CCTATTAGATCTGTCG | 2622 |
| | 183-198 | | | | |
| 16 | H45_ | GACAGATCTAATAGGA | 1671 | TCCTATTAGATCTGTC | 2623 |
| | 184-199 | | | | |
| 16 | H45_ | ACAGATCTAATAGGAA | 1672 | TTCCTATTAGATCTGT | 2624 |
| | 185-200 | | | | |
| 16 | H45_ | CAGATCTAATAGGAAT | 1673 | ATTCCTATTAGATCTG | 2625 |
| | 186-201 | | | | |
| 16 | H45_ | AGATCTAATAGGAATG | 1674 | CATTCCTATTAGATCT | 2626 |
| | 187-202 | | | | |
| 16 | H45_ | GATCTAATAGGAATGA | 1675 | TCATTCCTATTAGATC | 2627 |
| | 188-203 | | | | |
| 16 | H45_ | ATCTAATAGGAATGAA | 1676 | TTCATTCCTATTAGAT | 2628 |
| | 189-204 | | | | |
| 16 | H45_ | TCTAATAGGAATGAAA | 1677 | TTTCATTCCTATTAGA | 2629 |
| | 190-205 | | | | |
| 16 | H45_ | CTAATAGGAATGAAAA | 1678 | TTTTCATTCCTATTAG | 2630 |
| | 191-206 | | | | |
| 16 | H45_ | TAATAGGAATGAAAAC | 1679 | GTTTTCATTCCTATTA | 2631 |
| | 192-207 | | | | |
| 16 | H45_ | AATAGGAATGAAAACA | 1680 | TGTTTTCATTCCTATT | 2632 |
| | 193-208 | | | | |
| 16 | H45_ | ATAGGAATGAAAACAT | 1681 | ATGTTTTCATTCCTAT | 2633 |
| | 194-209 | | | | |
| 16 | H45_ | TAGGAATGAAAACATT | 1682 | AATGTTTTCATTCCTA | 2634 |
| | 195-210 | | | | |
| 16 | H45_ | AGGAATGAAAACATTT | 1683 | AAATGTTTTCATTCCT | 2635 |
| | 196-211 | | | | |
| 16 | H45_ | GGAATGAAAACATTTT | 1684 | AAAATGTTTTCATTCC | 2636 |
| | 197-212 | | | | |
| 16 | H45_ | GAATGAAAACATTTTA | 1685 | TAAAATGTTTTCATTC | 2637 |
| | 198-213 | | | | |
| 16 | H15_ | AATGAAAACATTTTAG | 1686 | CTAAAATGTTTTCATT | 2638 |
| | 199-214 | | | | |
| 16 | H45_ | ATGAAAACATTTTAGC | 1687 | GCTAAAATGTTTTCAT | 2639 |
| | 200-215 | | | | |
| 16 | H45_ | TGAAAACATTTTAGCA | 1688 | TGCTAAAATGTTTTCA | 2640 |
| | 201-216 | | | | |
| 16 | H45_ | GAAAACATTTTAGCAG | 1689 | CTGCTAAAATGTTTTC | 2641 |
| | 202-217 | | | | |
| 16 | H45_ | AAAACATTTTAGCAGA | 1690 | TCTGCTAAAATGTTTT | 2642 |
| | 203-218 | | | | |
| 16 | H45_ | AAACATTTTAGCAGAC | 1691 | GTCTGCTAAAATGTTT | 2643 |
| | 204-219 | | | | |
| 16 | H45_ | AACATTTTAGCAGACT | 1692 | AGTCTGCTAAAATGTT | 2644 |
| | 205-220 | | | | |
| 16 | H45_ | ACATTTTAGCAGACTT | 1693 | AAGTCTGCTAAAATGT | 2645 |
| | 206-221 | | | | |
| 16 | H45_ | CATTTTAGCAGACTTT | 1694 | AAAGTCTGCTAAAATG | 2646 |
| | 207-222 | | | | |
| 16 | H45_ | ATTTTAGCAGACTTTT | 1695 | AAAAGTCTGCTAAAAT | 2647 |
| | 208-223 | | | | |
| 16 | H45_ | TTTTAGCAGACTTTTT | 1696 | AAAAAGTCTGCTAAAA | 2648 |
| | 209-224 | | | | |
| 16 | H45_ | TTTAGCAGACTTTTTA | 1697 | TAAAAAGTCTGCTAAA | 2649 |
| | 210-225 | | | | |
| 16 | H45_ | TTAGCAGACTTTTTAA | 1698 | TTAAAAAGTCTGCTAA | 2650 |
| | 211-226 | | | | |
| 16 | H45_ | TAGCAGACTTTTTAAG | 1699 | CTTAAAAAGTCTGCTA | 2651 |
| | 212-227 | | | | |
| 16 | H45_ | AGCAGACTTTTTAAGC | 1700 | GCTTAAAAAGTCTGCT | 2652 |
| | 213-228 | | | | |
| 16 | H45_ | GCAGACTTTTTAAGCT | 1701 | AGCTTAAAAAGTCTGC | 2653 |
| | 214-229 | | | | |
| 16 | H45_ | CAGACTTTTTAAGCTT | 1702 | AAGCTTAAAAAGTCTG | 2654 |
| | 215-230 | | | | |
| 16 | H45_ | AGACTTTTTAAGCTTT | 1703 | AAAGCTTAAAAAGTCT | 2655 |
| | 216-231 | | | | |
| 16 | H45_ | GACTTTTTAAGCTTTC | 1704 | GAAAGCTTAAAAAGTC | 2656 |
| | 217-232 | | | | |
| 16 | H45_ | ACTTTTTAAGCTTTCT | 1705 | AGAAAGCTTAAAAAGT | 2657 |
| | 218-233 | | | | |
| 16 | H45_ | CTTTTTAAGCTTTCTT | 1706 | AAGAAAGCTTAAAAAG | 2658 |
| | 219-234 | | | | |
| 16 | H45_ | TTTTTAAGCTTTCTTT | 1707 | AAAGAAAGCTTAAAAA | 2659 |
| | 220-235 | | | | |
| 17 | H45_ | GAAAAAAGAGGTAGGGC | 1708 | GCCCTACCTCTTTTTTC | 2660 |
| | 167-183 | | | | |
| 17 | H45_ | AAAAAAGAGGTAGGGCG | 1709 | CGCCCTACCTCTTTTTT | 2661 |
| | 168-184 | | | | |
| 17 | H45_ | AAAAAGAGGTAGGGCGA | 1710 | TCGCCCTACCTCTTTTT | 2662 |
| | 169-185 | | | | |
| 17 | H45_ | AAAAGAGGTAGGGCGAC | 1711 | GTCGCCCTACCTCTTTT | 2663 |
| | 170-186 | | | | |
| 17 | H45_ | AAAGAGGTAGGGCGACA | 1712 | TGTCGCCCTACCTCTTT | 2664 |
| | 171-187 | | | | |
| 17 | H45_ | AAGAGGTAGGGCGACAG | 1713 | CTGTCGCCCTACCTCTT | 2665 |
| | 172-188 | | | | |
| 17 | H45_ | AGAGGTAGGGCGACAGA | 1714 | TCTGTCGCCCTACCTCT | 2666 |
| | 173-189 | | | | |
| 17 | H45_ | GAGGTAGGGCGACAGAT | 1715 | ATCTGTCGCCCTACCTC | 2667 |
| | 174-190 | | | | |
| 17 | H45_ | AGGTAGGGCGACAGATC | 1716 | GATCTGTCGCCCTACCT | 2668 |
| | 175-191 | | | | |
| 17 | H45_ | GGTAGGGCGACAGATCT | 1717 | AGATCTGTCGCCCTACC | 2669 |
| | 176-192 | | | | |
| 17 | H45_ | GTAGGGCGACAGATCTA | 1718 | TAGATCTGTCGCCCTAC | 2670 |
| | 177-193 | | | | |
| 17 | H45_ | TAGGGCGACAGATCTAA | 1719 | TTAGATCTGTCGCCCTA | 2671 |
| | 178-194 | | | | |
| 17 | H45_ | AGGGCGACAGATCTAAT | 1720 | ATTAGATCTGTCGCCCT | 2672 |
| | 179-195 | | | | |
| 17 | H45_ | GGGCGACAGATCTAATA | 1721 | TATTAGATCTGTCGCCC | 2673 |
| | 180-196 | | | | |
| 17 | H45_ | GGCGACAGATCTAATAG | 1722 | CTATTAGATCTGTCGCC | 2674 |
| | 181-197 | | | | |
| 17 | H45_ | GCGACAGATCTAATAGG | 1723 | CCTATTAGATCTGTCGC | 2675 |
| | 182-198 | | | | |
| 17 | H45_ | CGACAGATCTAATAGGA | 1724 | TCCTATTAGATCTGTCG | 2676 |
| | 183-199 | | | | |
| 17 | H45_ | GACAGATCTAATAGGAA | 1725 | TTCCTATTAGATCTGTC | 2677 |
| | 184-200 | | | | |
| 17 | H45_ | ACAGATCTAATAGGAAT | 1726 | ATTCCTATTAGATCTGT | 2678 |
| | 185-201 | | | | |
| 17 | H45_ | CAGATCTAATAGGAATG | 1727 | CATTCCTATTAGATCTG | 2679 |
| | 186-202 | | | | |
| 17 | H45_ | AGATCTAATAGGAATGA | 1728 | TCATTCCTATTAGATCT | 2680 |
| | 187-203 | | | | |
| 17 | H45_ | GATCTAATAGGAATGAA | 1729 | TTCATTCCTATTAGATC | 2681 |
| | 188-204 | | | | |
| 17 | H45_ | ATCTAATAGGAATGAAA | 1730 | TTTCATTCCTATTAGAT | 2682 |
| | 189-205 | | | | |
| 17 | H45_ | TCTAATAGGAATGAAAA | 1731 | TTTTCATTCCTATTAGA | 2683 |
| | 190-206 | | | | |
| 17 | H45_ | CTAATAGGAATGAAAAC | 1732 | GTTTTCATTCCTATTAG | 2684 |
| | 191-207 | | | | |
| 17 | H45_ | TAATAGGAATGAAAACA | 1733 | TGTTTTCATTCCTATTA | 2685 |
| | 192-208 | | | | |
| 17 | H45_ | AATAGGAATGAAAACAT | 1734 | ATGTTTTCATTCCTATT | 2686 |
| | 193-209 | | | | |
| 17 | H45_ | ATAGGAATGAAAACATT | 1735 | AATGTTTTCATTCCTAT | 2687 |
| | 194-210 | | | | |
| 17 | H45_ | TAGGAATGAAAACATTT | 1736 | AAATGTTTTCATTCCTA | 2688 |
| | 195-211 | | | | |
| 17 | H45_ | AGGAATGAAAACATTTT | 1737 | AAAATGTTTTCATTCCT | 2689 |
| | 196-212 | | | | |
| 17 | H45_ | GGAATGAAAACATTTTA | 1738 | TAAAATGTTTTCATTCC | 2690 |
| | 197-213 | | | | |
| 17 | H45_ | GAATGAAAACATTTTAG | 1739 | CTAAAATGTTTTCATTC | 2691 |
| | 198-214 | | | | |
| 17 | H45_ | AATGAAAACATTTTAGC | 1740 | GCTAAAATGTTTTCATT | 2692 |
| | 199-215 | | | | |
| 17 | H45_ | ATGAAAACATTTTAGCA | 1741 | TGCTAAAATGTTTTCAT | 2693 |
| | 020-216 | | | | |
| 17 | H45_ | TGAAAACATTTTAGCAG | 1742 | CTGCTAAAATGTTTTCA | 2694 |
| | 201-217 | | | | |
| 17 | H45_ | GAAAACATTTTAGCAGA | 1743 | TCTGCTAAAATGTTTTC | 2695 |
| | 202-218 | | | | |
| 17 | H45_ | AAAACATTTTAGCAGAC | 1744 | GTCTGCTAAAATGTTTT | 2696 |
| | 203-219 | | | | |
| 17 | H45_ | AAACATTTTAGCAGACT | 1745 | AGTCTGCTAAAATGTTT | 2697 |
| | 204-220 | | | | |
| 17 | H45_ | AACATTTTAGCAGACTT | 1746 | AAGTCTGCTAAAATGTT | 2698 |
| | 205-221 | | | | |
| 17 | H45_ | ACATTTTAGCAGACTTT | 1747 | AAAGTCTGCTAAAATGT | 2699 |
| | 206-222 | | | | |
| 17 | H45_ | CATTTTAGCAGACTTTT | 1748 | AAAAGTCTGCTAAAATG | 2700 |
| | 207-223 | | | | |
| 17 | H45_ | ATTTTAGCAGACTTTTT | 1749 | AAAAAGTCTGCTAAAAT | 2701 |
| | 208-224 | | | | |
| 17 | H45_ | TTTTAGCAGACTTTTTA | 1750 | TAAAAAGTCTGCTAAAA | 2702 |
| | 209-225 | | | | |
| 17 | H45_ | TTTAGCAGACTTTTTAA | 1751 | TTAAAAAGTCTGCTAAA | 2703 |
| | 210-226 | | | | |
| 17 | H45_ | TTAGCAGACTTTTTAAG | 1752 | CTTAAAAAGTCTGCTAA | 2704 |
| | 211-227 | | | | |
| 17 | H45_ | TAGCAGACTTTTTAAGC | 1753 | GCTTAAAAAGTCTGCTA | 2705 |
| | 212-228 | | | | |
| 17 | H45_ | AGCAGACTTTTTAAGCT | 1754 | AGCTTAAAAAGTCTGCT | 2706 |
| | 213-229 | | | | |
| 17 | H45_ | GCAGACTTTTTAAGCTT | 1755 | AAGCTTAAAAAGTCTGC | 2707 |
| | 214-230 | | | | |
| 17 | H45_ | CAGACTTTTTAAGCTTT | 1756 | AAAGCTTAAAAAGTCTG | 2708 |
| | 215-231 | | | | |
| 17 | H45_ | AGACTTTTTAAGCTTTC | 1757 | GAAAGCTTAAAAAGTCT | 2709 |
| | 216-232 | | | | |
| 17 | H45_ | GACTTTTTAAGCTTTCT | 1758 | AGAAAGCTTAAAAAGTC | 2710 |
| | 217-233 | | | | |
| 17 | H45_ | ACTTTTTAAGCTTTCTT | 1759 | AAGAAAGCTTAAAAAGT | 2711 |
| | 218-234 | | | | |
| 17 | H45_ | CTTTTTAAGCTTTCTTT | 1760 | AAAGAAAGCTTAAAAAG | 2712 |
| | 219-235 | | | | |
| 17 | H45_ | TTTTTAAGCTTTCTTTA | 1761 | TAAAGAAAGCTTAAAAA | 2713 |
| | 220-236 | | | | |
| 18 | H45_ | AGAAAAAAGAGGTAGGGC | 1762 | GCCCTACCTCTTTTTTCT | 2714 |
| | 166-183 | | | | |
| 18 | H45_ | GAAAAAAGAGGTAGGGCG | 1763 | CGCCCTACCTCTTTTTTC | 2715 |
| | 167-184 | | | | |
| 18 | H45_ | AAAAAAGAGGTAGGGCGA | 1764 | TCGCCCTACCTCTTTTTT | 2716 |
| | 168-185 | | | | |
| 18 | H45_ | AAAAAGAGGTAGGGCGAC | 1765 | GTCGCCCTACCTCTTTTT | 2717 |
| | 169-186 | | | | |
| 18 | H45_ | AAAAGAGGTAGGGCGACA | 1766 | TGTCGCCCTACCTCTTTT | 2718 |
| | 170-187 | | | | |
| 18 | H45_ | AAAGAGGTAGGGCGACAG | 1767 | CTGTCGCCCTACCTCTTT | 2719 |
| | 171-188 | | | | |
| 18 | H45_ | AAGAGGTAGGGCGACAGA | 1768 | TCTGTCGCCCTACCTCTT | 2720 |
| | 172-189 | | | | |
| 18 | H45_ | AGAGGTAGGGCGACAGAT | 1769 | ATCTGTCGCCCTACCTCT | 2721 |
| | 173-190 | | | | |
| 18 | H45_ | GAGGTAGGGCGACAGATC | 1770 | GATCTGTCGCCCTACCTC | 2722 |
| | 174-191 | | | | |
| 18 | H45_ | AGGTAGGGCGACAGATCT | 1771 | AGATCTGTCGCCCTACCT | 2723 |
| | 175-192 | | | | |
| 18 | H45_ | GGTAGGGCGACAGATCTA | 1772 | TAGATCTGTCGCCCTACC | 2724 |
| | 176-193 | | | | |
| 18 | H45_ | GTAGGGCGACAGATCTAA | 1773 | TTAGATCTGTCGCCCTAC | 2725 |
| | 177-194 | | | | |
| 18 | H45_ | TAGGGCGACAGATCTAAT | 1774 | ATTAGATCTGTCGCCCTA | 2726 |
| | 178-195 | | | | |
| 18 | H45_ | AGGGCGACAGATCTAATA | 1775 | TATTAGATCTGTCGCCCT | 2727 |
| | 179-196 | | | | |
| 18 | H45_ | GGGCGACAGATCTAATAG | 1776 | CTATTAGATCTGTCGCCC | 2728 |
| | 180-197 | | | | |
| 18 | H45_ | GGCGACAGATCTAATAGG | 1777 | CCTATTAGATCTGTCGCC | 2729 |
| | 181-198 | | | | |
| 18 | H45_ | GCGACAGATCTAATAGGA | 1778 | TCCTATTAGATCTGTCGC | 2730 |
| | 182-199 | | | | |
| 18 | H45_ | CGACAGATCTAATAGGAA | 1779 | TTCCTATTAGATCTGTCG | 2731 |
| | 183-200 | | | | |
| 18 | H45_ | GACAGATCTAATAGGAAT | 1780 | ATTCCTATTAGATCTGTC | 2732 |
| | 184-201 | | | | |
| 18 | H45_ | ACAGATCTAATAGGAATG | 1781 | CATTCCTATTAGATCTGT | 2733 |
| | 185-202 | | | | |
| 18 | H45_ | CAGATCTAATAGGAATGA | 1782 | TCATTCCTATTAGATCTG | 2734 |
| | 186-203 | | | | |
| 18 | H45_ | AGATCTAATAGGAATGAA | 1783 | TTCATTCCTATTAGATCT | 2735 |
| | 187-204 | | | | |
| 18 | H45_ | GATCTAATAGGAATGAAA | 1784 | TTTCATTCCTATTAGATC | 2736 |
| | 188-205 | | | | |
| 18 | H45_ | ATCTAATAGGAATGAAAA | 1785 | TTTTCATTCCTATTAGAT | 2737 |
| | 189-206 | | | | |
| 18 | H45_ | TCTAATAGGAATGAAAAC | 1786 | GTTTTCATTCCTATTAGA | 2738 |
| | 190-207 | | | | |
| 18 | H45_ | CTAATAGGAATGAAAACA | 1787 | TGTTTTCATTCCTATTAG | 2739 |
| | 191-208 | | | | |
| 18 | H45_ | TAATAGGAATGAAAACAT | 1788 | ATGTTTTCATTCCTATTA | 2740 |
| | 192-209 | | | | |
| 18 | H45_19 | AATAGGAATGAAAACATT | 1789 | AATGTTTTCATTCCTATT | 274 |
| | 3-210 | | | | 1 |
| 18 | H45_19 | ATAGGAATGAAAACATTT | 1790 | AAATGTTTTCATTCCTAT | 274 |
| | 4-211 | | | | 2 |
| 18 | H45_19 | TAGGAATGAAAACATTTT | 1791 | AAAATGTTTTCATTCCTA | 274 |
| | 5-212 | | | | 3 |
| 18 | H45_19 | AGGAATGAAAACATTTTA | 1792 | TAAAATGTTTTCATTCCT | 274 |
| | 6-213 | | | | 4 |
| 18 | H45_19 | GGAATGAAAACATTTTAG | 1793 | CTAAAATGTTTTCATTCC | 274 |
| | 7-214 | | | | 5 |
| 18 | H45_19 | GAATGAAAACATTTTAGC | 1794 | GCTAAAATGTTTTCATTC | 274 |
| | 8-215 | | | | 6 |
| 18 | H45_19 | AATGAAAACATTTTAGCA | 1795 | TGCTAAAATGTTTTCATT | 274 |
| | 9-216 | | | | 7 |
| 18 | H45_20 | ATGAAAACATTTTAGCAG | 1796 | CTGCTAAAATGTTTTCAT | 274 |
| | 0-217 | | | | 8 |
| 18 | H45_20 | TGAAAACATTTTAGCAGA | 1797 | TCTGCTAAAATGTTTTCA | 274 |
| | 1-218 | | | | 9 |
| 18 | H45_20 | GAAAACATTTTAGCAGAC | 1798 | GTCTGCTAAAATGTTTTC | 275 |
| | 2-219 | | | | 0 |
| 18 | H45_20 | AAAACATTTTAGCAGACT | 1799 | AGTCTGCTAAAATGTTTT | 275 |
| | 3-220 | | | | 1 |
| 18 | H45_20 | AAACATTTTAGCAGACTT | 1800 | AAGTCTGCTAAAATGTTT | 275 |
| | 4-221 | | | | 2 |
| 18 | H45_20 | AACATTTTAGCAGACTTT | 1801 | AAAGTCTGCTAAAATGTT | 275 |
| | 5-222 | | | | 3 |
| 18 | H45_20 | ACATTTTAGCAGACTTTT | 1802 | AAAAGTCTGCTAAAATGT | 275 |
| | 6-223 | | | | 4 |
| 18 | H45_20 | CATTTTAGCAGACTTTTT | 1803 | AAAAAGTCTGCTAAAATG | 275 |
| | 7-224 | | | | 5 |
| 18 | H45_20 | ATTTTAGCAGACTTTTTA | 1804 | TAAAAAGTCTGCTAAAAT | 275 |
| | 8-225 | | | | 6 |
| 18 | H45_20 | TTTTAGCAGACTTTTTAA | 1805 | TTAAAAAGTCTGCTAAAA | 275 |
| | 9-226 | | | | 7 |
| 18 | H45_21 | TTTAGCAGACTTTTTAAG | 1806 | CTTAAAAAGTCTGCTAAA | 275 |
| | 0-227 | | | | 8 |
| 18 | H45_21 | TTAGCAGACTTTTTAAGC | 1807 | GCTTAAAAAGTCTGCTAA | 275 |
| | 1-228 | | | | 9 |
| 18 | H45_21 | TAGCAGACTTTTTAAGCT | 1808 | AGCTTAAAAAGTCTGCTA | 276 |
| | 2-229 | | | | 0 |
| 18 | H45_21 | AGCAGACTTTTTAAGCTT | 1809 | AAGCTTAAAAAGTCTGCT | 276 |
| | 3-230 | | | | 1 |
| 18 | H45_21 | GCAGACTTTTTAAGCTTT | 1810 | AAAGCTTAAAAAGTCTGC | 276 |
| | 4-231 | | | | 2 |
| 18 | H45_21 | CAGACTTTTTAAGCTTTC | 1811 | GAAAGCTTAAAAAGTCTG | 276 |
| | 5-232 | | | | 3 |
| 18 | H45_21 | AGACTTTTTAAGCTTTCT | 1812 | AGAAAGCTTAAAAAGTCT | 276 |
| | 6-233 | | | | 4 |
| 18 | H45_21 | GACTTTTTAAGCTTTCTT | 1813 | AAGAAAGCTTAAAAAGTC | 276 |
| | 7-234 | | | | 5 |
| 18 | H45_21 | ACTTTTTAAGCTTTCTTT | 1814 | AAAGAAAGCTTAAAAAGT | 276 |
| | 8-235 | | | | 6 |
| 18 | H45_21 | CTTTTTAAGCTTTCTTTA | 1815 | TAAAGAAAGCTTAAAAAG | 276 |
| | 9-236 | | | | 7 |
| 18 | H45_22 | TTTTTAAGCTTTCTTTAG | 1816 | CTAAAGAAAGCTTAAAAA | 276 |
| | 0-237 | | | | 8 |
| 19 | H45_16 | CAGAAAAAAGAGGTAGGGC | 1817 | GCCCTACCTCTTTTTTCTG | 276 |
| | 5-183 | | | | 9 |
| 19 | H45_16 | AGAAAAAAGAGGTAGGGCG | 1818 | CGCCCTACCTCTTTTTTCT | 277 |
| | 6-184 | | | | 0 |
| 19 | H45_16 | GAAAAAAGAGGTAGGGCGA | 1819 | TCGCCCTACCTCTTTTTTC | 277 |
| | 7-185 | | | | 1 |
| 19 | H45_16 | AAAAAAGAGGTAGGGCGAC | 1820 | GTCGCCCTACCTCTTTTTT | 277 |
| | 8-186 | | | | 2 |
| 19 | H45_16 | AAAAAGAGGTAGGGCGACA | 1821 | TGTCGCCCTACCTCTTTTT | 277 |
| | 9-187 | | | | 3 |
| 19 | H45_17 | AAAAGAGGTAGGGCGACAG | 1822 | CTGTCGCCCTACCTCTTTT | 277 |
| | 0-188 | | | | 4 |
| 19 | H45_17 | AAAGAGGTAGGGCGACAGA | 1823 | TCTGTCGCCCTACCTCTTT | 277 |
| | 1-189 | | | | 5 |
| 19 | H45_17 | AAGAGGTAGGGCGACAGAT | 1824 | ATCTGTCGCCCTACCTCTT | 277 |
| | 2-190 | | | | 6 |
| 19 | H45_17 | AGAGGTAGGGCGACAGATC | 1825 | GATCTGTCGCCCTACCTCT | 277 |
| | 3-191 | | | | 7 |
| 19 | H45_17 | GAGGTAGGGCGACAGATCT | 1826 | AGATCTGTCGCCCTACCTC | 277 |
| | 4-192 | | | | 8 |
| 19 | H45_17 | AGGTAGGGCGACAGATCTA | 1827 | TAGATCTGTCGCCCTACCT | 277 |
| | 5-193 | | | | 9 |
| 19 | H45_17 | GGTAGGGCGACAGATCTAA | 1828 | TTAGATCTGTCGCCCTACC | 278 |
| | 6-194 | | | | 0 |
| 19 | H45_17 | GTAGGGCGACAGATCTAAT | 1829 | ATTAGATCTGTCGCCCTAC | 278 |
| | 7-195 | | | | 1 |
| 19 | H45_17 | TAGGGCGACAGATCTAATA | 1830 | TATTAGATCTGTCGCCCTA | 278 |
| | 8-196 | | | | 2 |
| 19 | H45_17 | AGGGCGACAGATCTAATAG | 1831 | CTATTAGATCTGTCGCCCT | 278 |
| | 9-197 | | | | 3 |
| 19 | H45_18 | GGGCGACAGATCTAATAGG | 1832 | CCTATTAGATCTGTCGCCC | 278 |
| | 0-198 | | | | 4 |
| 19 | H45_18 | GGCGACAGATCTAATAGGA | 1833 | TCCTATTAGATCTGTCGCC | 278 |
| | 1-199 | | | | 5 |
| 19 | H45_18 | GCGACAGATCTAATAGGAA | 1834 | TTCCTATTAGATCTGTCGC | 278 |
| | 2-200 | | | | 6 |
| 19 | H45_18 | CGACAGATCTAATAGGAAT | 1835 | ATTCCTATTAGATCTGTCG | 278 |
| | 3-201 | | | | 7 |
| 19 | H45_18 | GACAGATCTAATAGGAATG | 1836 | CATTCCTATTAGATCTGTC | 278 |
| | 4-202 | | | | 8 |
| 19 | H45_18 | ACAGATCTAATAGGAATGA | 1837 | TCATTCCTATTAGATCTGT | 278 |
| | 5-203 | | | | 9 |
| 19 | H45_18 | CAGATCTAATAGGAATGAA | 1838 | TTCATTCCTATTAGATCTG | 279 |
| | 6-204 | | | | 0 |
| 19 | H45_18 | AGATCTAATAGGAATGAAA | 1839 | TTTCATTCCTATTAGATCT | 279 |
| | 7-205 | | | | 1 |
| 19 | H45_18 | GATCTAATAGGAATGAAAA | 1840 | TTTTCATTCCTATTAGATC | 279 |
| | 8-206 | | | | 2 |
| 19 | H45_18 | ATCTAATAGGAATGAAAAC | 1841 | GTTTTCATTCCTATTAGAT | 279 |
| | 9-207 | | | | 3 |
| 19 | H45_19 | TCTAATAGGAATGAAAACA | 1842 | TGTTTTCATTCCTATTAGA | 279 |
| | 0-208 | | | | 4 |
| 19 | H45_19 | CTAATAGGAATGAAAACAT | 1843 | ATGTTTTCATTCCTATTAG | 279 |
| | 1-209 | | | | 5 |
| 19 | H45_19 | TAATAGGAATGAAAACATT | 1844 | AATGTTTTCATTCCTATTA | 279 |
| | 2-210 | | | | 6 |
| 19 | H45_19 | AATAGGAATGAAAACATTT | 1845 | AAATGTTTTCATTCCTATT | 279 |
| | 3-211 | | | | 7 |
| 19 | H45_19 | ATAGGAATGAAAACATTTT | 1846 | AAAATGTTTTCATTCCTAT | 279 |
| | 4-212 | | | | 8 |
| 19 | H45_19 | TAGGAATGAAAACATTTTA | 1847 | TAAAATGTTTTCATTCCTA | 279 |
| | 5-213 | | | | 9 |
| 19 | H45_19 | AGGAATGAAAACATTTTAG | 1848 | CTAAAATGTTTTCATTCCT | 280 |
| | 6-214 | | | | 0 |
| 19 | H45_19 | GGAATGAAAACATTTTAGC | 1849 | GCTAAAATGTTTTCATTCC | 280 |
| | 7-215 | | | | 1 |
| 19 | H45_19 | GAATGAAAACATTTTAGCA | 1850 | TGCTAAAATGTTTTCATTC | 280 |
| | 8-216 | | | | 2 |
| 19 | H45_19 | AATGAAAACATTTTAGCAG | 1851 | CTGCTAAAATGTTTTCATT | 280 |
| | 9-217 | | | | 3 |
| 19 | H45_20 | ATGAAAACATTTTAGCAGA | 1852 | TCTGCTAAAATGTTTTCAT | 280 |
| | 0-218 | | | | 4 |
| 19 | H45_20 | TGAAAACATTTTAGCAGAC | 1853 | GTCTGCTAAAATGTTTTCA | 280 |
| | 1-219 | | | | 5 |
| 19 | H45_20 | GAAAACATTTTAGCAGACT | 1854 | AGTCTGCTAAAATGTTTTC | 280 |
| | 2-220 | | | | 6 |
| 19 | H45_20 | AAAACATTTTAGCAGACTT | 1855 | AAGTCTGCTAAAATGTTTT | 280 |
| | 3-221 | | | | 7 |
| 19 | H45_20 | AAACATTTTAGCAGACTTT | 1856 | AAAGTCTGCTAAAATGTTT | 280 |
| | 4-222 | | | | 8 |
| 19 | H45_20 | AACATTTTAGCAGACTTTT | 1857 | AAAAGTCTGCTAAAATGTT | 280 |
| | 5-223 | | | | 9 |
| 19 | H45_20 | ACATTTTAGCAGACTTTTT | 1858 | AAAAAGTCTGCTAAAATGT | 281 |
| | 6-224 | | | | 0 |
| 19 | H45_20 | CATTTTAGCAGACTTTTTA | 1859 | TAAAAAGTCTGCTAAAATG | 281 |
| | 7-225 | | | | 1 |
| 19 | H45_20 | ATTTTAGCAGACTTTTTAA | 1860 | TTAAAAAGTCTGCTAAAAT | 281 |
| | 8-226 | | | | 2 |
| 19 | H45_20 | TTTTAGCAGACTTTTTAAG | 1861 | CTTAAAAAGTCTGCTAAAA | 281 |
| | 9-227 | | | | 3 |
| 19 | H45_21 | TTTAGCAGACTTTTTAAGC | 1862 | GCTTAAAAAGTCTGCTAAA | 281 |
| | 0-228 | | | | 4 |
| 19 | H45_21 | TTAGCAGACTTTTTAAGCT | 1863 | AGCTTAAAAAGTCTGCTAA | 281 |
| | 1-229 | | | | 5 |
| 19 | H45_21 | TAGCAGACTTTTTAAGCTT | 1864 | AAGCTTAAAAAGTCTGCTA | 281 |
| | 2-230 | | | | 6 |
| 19 | H45_21 | AGCAGACTTTTTAAGCTTT | 1865 | AAAGCTTAAAAAGTCTGCT | 281 |
| | 3-231 | | | | 7 |
| 19 | H45_21 | GCAGACTTTTTAAGCTTTC | 1866 | GAAAGCTTAAAAAGTCTGC | 281 |
| | 4-232 | | | | 8 |
| 19 | H45_21 | CAGACTTTTTAAGCTTTCT | 1867 | AGAAAGCTTAAAAAGTCTG | 281 |
| | 5-233 | | | | 9 |
| 19 | H45_21 | AGACTTTTTAAGCTTTCTT | 1868 | AAGAAAGCTTAAAAAGTCT | 282 |
| | 6-234 | | | | 0 |
| 19 | H45_21 | GACTTTTTAAGCTTTCTTT | 1869 | AAAGAAAGCTTAAAAAGTC | 282 |
| | 7-235 | | | | 1 |
| 19 | H45_21 | ACTTTTTAAGCTTTCTTTA | 1870 | TAAAGAAAGCTTAAAAAGT | 282 |
| | 8-236 | | | | 2 |
| 19 | H45_21 | CTTTTTAAGCTTTCTTTAG | 1871 | CTAAAGAAAGCTTAAAAAG | 282 |
| | 9-237 | | | | 3 |
| 19 | H45_22 | TTTTTAAGCTTTCTTTAGA | 1872 | TCTAAAGAAAGCTTAAAAA | 282 |
| | 0-238 | | | | 4 |
| 20 | H45_16 | ACAGAAAAAAGAGGTAGGGC | 1873 | GCCCTACCTCTTTTTTCTGT | 282 |
| | 4-183 | | | | 5 |
| 20 | H45_16 | CAGAAAAAAGAGGTAGGGCG | 1874 | CGCCCTACCTCTTTTTTCTG | 282 |
| | 5-184 | | | | 6 |
| 20 | H45_16 | AGAAAAAAGAGGTAGGGCGA | 1875 | TCGCCCTACCTCTTTTTTCT | 282 |
| | 6-185 | | | | 7 |
| 20 | H45_16 | GAAAAAAGAGGTAGGGCGAC | 1876 | GTCGCCCTACCTCTTTTTTC | 282 |
| | 7-186 | | | | 8 |
| 20 | H45_16 | AAAAAAGAGGTAGGGCGACA | 1877 | TGTCGCCCTACCTCTTTTTT | 282 |
| | 8-187 | | | | 9 |
| 20 | H45_16 | AAAAAGAGGTAGGGCGACAG | 1878 | CTGTCGCCCTACCTCTTTTT | 283 |
| | 9-188 | | | | 0 |
| 20 | H45_17 | AAAAGAGGTAGGGCGACAGA | 1879 | TCTGTCGCCCTACCTCTTTT | 283 |
| | 0-189 | | | | 1 |
| 20 | H45_17 | AAAGAGGTAGGGCGACAGAT | 1880 | ATCTGTCGCCCTACCTCTTT | 283 |
| | 1-190 | | | | 2 |
| 20 | H45_17 | AAGAGGTAGGGCGACAGATC | 1881 | GATCTGTCGCCCTACCTCTT | 283 |
| | 2-191 | | | | 3 |
| 20 | H45_17 | AGAGGTAGGGCGACAGATCT | 1882 | AGATCTGTCGCCCTACCTCT | 283 |
| | 3-192 | | | | 4 |
| 20 | H45_17 | GAGGTAGGGCGACAGATCTA | 1883 | TAGATCTGTCGCCCTACCTC | 283 |
| | 4-193 | | | | 5 |
| 20 | H45_17 | AGGTAGGGCGACAGATCTAA | 1884 | TTAGATCTGTCGCCCTACCT | 283 |
| | 5-194 | | | | 6 |
| 20 | H45_17 | GGTAGGGCGACAGATCTAAT | 1885 | ATTAGATCTGTCGCCCTACC | 283 |
| | 6-195 | | | | 7 |
| 20 | H45_17 | GTAGGGCGACAGATCTAATA | 1886 | TATTAGATCTGTCGCCCTAC | 283 |
| | 7-196 | | | | 8 |
| 20 | H45_17 | TAGGGCGACAGATCTAATAG | 1887 | CTATTAGATCTGTCGCCCTA | 283 |
| | 8-197 | | | | 9 |
| 20 | H45_17 | AGGGCGACAGATCTAATAGG | 1888 | CCTATTAGATCTGTCGCCCT | 284 |
| | 9-198 | | | | 0 |
| 20 | H45_18 | GGGCGACAGATCTAATAGGA | 1889 | TCCTATTAGATCTGTCGCCC | 284 |
| | 0-199 | | | | 1 |
| 20 | H45_18 | GGCGACAGATCTAATAGGAA | 1890 | TTCCTATTAGATCTGTCGCC | 284 |
| | 1-200 | | | | 2 |
| 20 | H45_18 | GCGACAGATCTAATAGGAAT | 1891 | ATTCCTATTAGATCTGTCGC | 284 |
| | 2-201 | | | | 3 |
| 20 | H45_18 | CGACAGATCTAATAGGAATG | 1892 | CATTCCTATTAGATCTGTCG | 284 |
| | 3-202 | | | | 4 |
| 20 | H45_18 | GACAGATCTAATAGGAATGA | 1893 | TCATTCCTATTAGATCTGTC | 284 |
| | 4-203 | | | | 5 |
| 20 | H45_18 | ACAGATCTAATAGGAATGAA | 1894 | TTCATTCCTATTAGATCTGT | 284 |
| | 5-204 | | | | 6 |
| 20 | H45_18 | CAGATCTAATAGGAATGAAA | 1895 | TTTCATTCCTATTAGATCTG | 284 |
| | 6-205 | | | | 7 |
| 20 | H45_18 | AGATCTAATAGGAATGAAAA | 1896 | TTTTCATTCCTATTAGATCT | 284 |
| | 7-206 | | | | 8 |
| 20 | H45_18 | GATCTAATAGGAATGAAAAC | 1897 | GTTTTCATTCCTATTAGATC | 284 |
| | 8-207 | | | | 9 |
| 20 | H45_18 | ATCTAATAGGAATGAAAACA | 1898 | TGTTTTCATTCCTATTAGAT | 285 |
| | 9-208 | | | | 0 |
| 20 | H45_19 | TCTAATAGGAATGAAAACAT | 1899 | ATGTTTTCATTCCTATTAGA | 285 |
| | 0-209 | | | | 1 |
| 20 | H45_19 | CTAATAGGAATGAAAACATT | 1900 | AATGTTTTCATTCCTATTAG | 285 |
| | 1-210 | | | | 2 |
| 20 | H45_19 | TAATAGGAATGAAAACATTT | 1901 | AAATGTTTTCATTCCTATTA | 285 |
| | 2-211 | | | | 3 |
| 20 | H45_19 | AATAGGAATGAAAACATTTT | 1902 | AAAATGTTTTCATTCCTATT | 285 |
| | 3-212 | | | | 4 |
| 20 | H45_19 | ATAGGAATGAAAACATTTTA | 1903 | TAAAATGTTTTCATTCCTAT | 285 |
| | 4-213 | | | | 5 |
| 20 | H45_19 | TAGGAATGAAAACATTTTAG | 1904 | CTAAAATGTTTTCATTCCTA | 285 |
| | 5-214 | | | | 6 |
| 20 | H45_19 | AGGAATGAAAACATTTTAGC | 1905 | GCTAAAATGTTTTCATTCCT | 285 |
| | 6-215 | | | | 7 |
| 20 | H45_19 | GGAATGAAAACATTTTAGCA | 1906 | TGCTAAAATGTTTTCATTCC | 285 |
| | 7-216 | | | | 8 |
| 20 | H45_19 | GAATGAAAACATTTTAGCAG | 1907 | CTGCTAAAATGTTTTCATTC | 285 |
| | 8-217 | | | | 9 |
| 20 | H45_19 | AATGAAAACATTTTAGCAGA | 1908 | TCTGCTAAAATGTTTTCATT | 286 |
| | 9-218 | | | | 0 |
| 20 | H45_20 | ATGAAAACATTTTAGCAGAC | 1909 | GTCTGCTAAAATGTTTTCAT | 286 |
| | 0-219 | | | | 1 |
| 20 | H45_20 | TGAAAACATTTTAGCAGACT | 1910 | AGTCTGCTAAAATGTTTTCA | 286 |
| | 1-220 | | | | 2 |
| 20 | H45_20 | GAAAACATTTTAGCAGACTT | 1911 | AAGTCTGCTAAAATGTTTTC | 286 |
| | 2-221 | | | | 3 |
| 20 | H45_20 | AAAACATTTTAGCAGACTTT | 1912 | AAAGTCTGCTAAAATGTTTT | 286 |
| | 3-222 | | | | 4 |
| 20 | H45_20 | AAACATTTTAGCAGACTTTT | 1913 | AAAAGTCTGCTAAAATGTTT | 286 |
| | 4-223 | | | | 5 |
| 20 | H45_20 | AACATTTTAGCAGACTTTTT | 1914 | AAAAAGTCTGCTAAAATGTT | 286 |
| | 5-224 | | | | 6 |
| 20 | H45_20 | ACATTTTAGCAGACTTTTTA | 1915 | TAAAAAGTCTGCTAAAATGT | 286 |
| | 6-225 | | | | 7 |
| 20 | H45_20 | CATTTTAGCAGACTTTTTAA | 1916 | TTAAAAAGTCTGCTAAAATG | 286 |
| | 7-226 | | | | 8 |
| 20 | H45_20 | ATTTTAGCAGACTTTTTAAG | 1917 | CTTAAAAAGTCTGCTAAAAT | 286 |
| | 8-227 | | | | 9 |
| 20 | H45_20 | TTTTAGCAGACTTTTTAAGC | 1918 | GCTTAAAAAGTCTGCTAAAA | 287 |
| | 9-228 | | | | 0 |
| 20 | H45_21 | TTTAGCAGACTTTTTAAGCT | 1919 | AGCTTAAAAAGTCTGCTAAA | 287 |
| | 0-229 | | | | 1 |
| 20 | H45_21 | TTAGCAGACTTTTTAAGCTT | 1920 | AAGCTTAAAAAGTCTGCTAA | 287 |
| | 1-230 | | | | 2 |
| 20 | H45_21 | TAGCAGACTTTTTAAGCTTT | 1921 | AAAGCTTAAAAAGTCTGCTA | 287 |
| | 2-231 | | | | 3 |
| 20 | H45_21 | AGCAGACTTTTTAAGCTTTC | 1922 | GAAAGCTTAAAAAGTCTGCT | 287 |
| | 3-232 | | | | 4 |
| 20 | H45_21 | GCAGACTTTTTAAGCTTTCT | 1923 | AGAAAGCTTAAAAAGTCTGC | 287 |
| | 4-233 | | | | 5 |
| 20 | H45_21 | CAGACTTTTTAAGCTTTCTT | 1924 | AAGAAAGCTTAAAAAGTCTG | 287 |
| | 5-234 | | | | 6 |
| 20 | H45_21 | AGACTTTTTAAGCTTTCTTT | 1925 | AAAGAAAGCTTAAAAAGTCT | 287 |
| | 6-235 | | | | 7 |
| 20 | H45_21 | GACTTTTTAAGCTTTCTTTA | 1926 | TAAAGAAAGCTTAAAAAGTC | 287 |
| | 7-236 | | | | 8 |
| 20 | H45_21 | ACTTTTTAAGCTTTCTTTAG | 1927 | CTAAAGAAAGCTTAAAAAGT | 287 |
| | 8-237 | | | | 9 |
| 20 | H45_21 | CTTTTTAAGCTTTCTTTAGA | 1928 | TCTAAAGAAAGCTTAAAAAG | 288 |
| | 9-238 | | | | 0 |
| 20 | H45_22 | TTTTTAAGCTTTCTTTAGAA | 1929 | TTCTAAAGAAAGCTTAAAAA | 288 |
| | 0-239 | | | | 1 |
| 21 | H45_16 | GACAGAAAAAAGAGGTAGGGC | 1930 | GCCCTACCTCTTTTTTCTGTC | 288 |
| | 3-183 | | | | 2 |
| 21 | H45_16 | ACAGAAAAAAGAGGTAGGGCG | 1931 | CGCCCTACCTCTTTTTTCTGT | 288 |
| | 4-184 | | | | 3 |
| 21 | H45_16 | CAGAAAAAAGAGGTAGGGCGA | 1932 | TCGCCCTACCTCTTTTTTCTG | 288 |
| | 5-185 | | | | 4 |
| 21 | H45_16 | AGAAAAAAGAGGTAGGGCGAC | 1933 | GTCGCCCTACCTCTTTTTTCT | 288 |
| | 6-186 | | | | 5 |
| 21 | H45_16 | GAAAAAAGAGGTAGGGCGACA | 1934 | TGTCGCCCTACCTCTTTTTTC | 288 |
| | 7-187 | | | | 6 |
| 21 | H45_16 | AAAAAAGAGGTAGGGCGACAG | 1935 | CTGTCGCCCTACCTCTTTTTT | 288 |
| | 8-188 | | | | 7 |
| 21 | H45_16 | AAAAAGAGGTAGGGCGACAGA | 1936 | TCTGTCGCCCTACCTCTTTTT | 288 |
| | 9-189 | | | | 8 |
| 21 | H45_17 | AAAAGAGGTAGGGCGACAGAT | 1937 | ATCTGTCGCCCTACCTCTTTT | 288 |
| | 0-190 | | | | 9 |
| 21 | H45_17 | AAAGAGGTAGGGCGACAGATC | 1938 | GATCTGTCGCCCTACCTCTTT | 289 |
| | 1-191 | | | | 0 |
| 21 | H45_17 | AAGAGGTAGGGCGACAGATCT | 1939 | AGATCTGTCGCCCTACCTCTT | 289 |
| | 2-192 | | | | 1 |
| 21 | H45_17 | AGAGGTAGGGCGACAGATCTA | 1940 | TAGATCTGTCGCCCTACCTCT | 289 |
| | 3-193 | | | | 2 |
| 21 | H45_17 | GAGGTAGGGCGACAGATCTAA | 1941 | TTAGATCTGTCGCCCTACCTC | 289 |
| | 4-194 | | | | 3 |
| 21 | H45_17 | AGGTAGGGCGACAGATCTAAT | 1912 | ATTAGATCTGTCGCCCTACCT | 289 |
| | 5-195 | | | | 4 |
| 21 | H45_17 | GGTAGGGCGACAGATCTAATA | 1943 | TATTAGATCTGTCGCCCTACC | 289 |
| | 6-196 | | | | 5 |
| 21 | H45_17 | GTAGGGCGACAGATCTAATAG | 1944 | CTATTAGATCTGTCGCCCTAC | 289 |
| | 7-197 | | | | 6 |
| 21 | H45_17 | TAGGGCGACAGATCTAATAGG | 1945 | CCTATTAGATCTGTCGCCCTA | 289 |
| | 8-198 | | | | 7 |
| 21 | H45_17 | AGGGCGACAGATCTAATAGGA | 1946 | TCCTATTAGATCTGTCGCCCT | 289 |
| | 9-199 | | | | 8 |
| 21 | H45_18 | GGGCGACAGATCTAATAGGAA | 1947 | TTCCTATTAGATCTGTCGCCC | 289 |
| | 0-200 | | | | 9 |
| 21 | H45_18 | GGCGACAGATCTAATAGGAAT | 1948 | ATTCCTATTAGATCTGTCGCC | 290 |
| | 1-201 | | | | 0 |
| 21 | H45_18 | GCGACAGATCTAATAGGAATG | 1949 | CATTCCTATTAGATCTGTCGC | 290 |
| | 2-202 | | | | 1 |
| 21 | H45_18 | CGACAGATCTAATAGGAATGA | 1950 | TCATTCCTATTAGATCTGTCG | 290 |
| | 3-203 | | | | 2 |
| 21 | H45_18 | GACAGATCTAATAGGAATGAA | 1951 | TTCATTCCTATTAGATCTGTC | 290 |
| | 4-204 | | | | 3 |
| 21 | H45_18 | ACAGATCTAATAGGAATGAAA | 1952 | TTTCATTCCTATTAGATCTGT | 290 |
| | 5-205 | | | | 4 |
| 21 | H45_18 | CAGATCTAATAGGAATGAAAA | 1953 | TTTTCATTCCTATTAGATCTG | 290 |
| | 6-206 | | | | 5 |
| 21 | H45_18 | AGATCTAATAGGAATGAAAAC | 1954 | GTTTTCATTCCTATTAGATCT | 290 |
| | 7-207 | | | | 6 |
| 21 | H45_18 | GATCTAATAGGAATGAAAACA | 1955 | TGTTTTCATTCCTATTAGATC | 290 |
| | 8-208 | | | | 7 |
| 21 | H45_18 | ATCTAATAGGAATGAAAACAT | 1956 | ATGTTTTCATTCCTATTAGAT | 290 |
| | 9-209 | | | | 8 |
| 21 | H45_19 | TCTAATAGGAATGAAAACATT | 1957 | AATGTTTTCATTCCTATTAGA | 290 |
| | 0-210 | | | | 9 |
| 21 | H45_19 | CTAATAGGAATGAAAACATTT | 1958 | AAATGTTTTCATTCCTATTAG | 291 |
| | 1-211 | | | | 0 |
| 21 | H45_19 | TAATAGGAATGAAAACATTTT | 1959 | AAAATGTTTTCATTCCTATTA | 291 |
| | 2-212 | | | | 1 |
| 21 | H45_19 | AATAGGAATGAAAACATTTTA | 1960 | TAAAATGTTTTCATTCCTATT | 291 |
| | 3-213 | | | | 2 |
| 21 | H45_19 | ATAGGAATGAAAACATTTTAG | 1961 | CTAAAATGTTTTCATTCCTAT | 291 |
| | 4-214 | | | | 3 |
| 21 | H45_19 | TAGGAATGAAAACATTTTAGC | 1962 | GCTAAAATGTTTTCATTCCTA | 291 |
| | 5-215 | | | | 4 |
| 21 | H45_19 | AGGAATGAAAACATTTTAGCA | 1963 | TGCTAAAATGTTTTCATTCCT | 291 |
| | 6-216 | | | | 5 |
| 21 | H45_19 | GGAATGAAAACATTTTAGCAG | 1964 | CTGCTAAAATGTTTTCATTCC | 291 |
| | 7-217 | | | | 6 |
| 21 | H45_19 | GAATGAAAACATTTTAGCAGA | 1965 | TCTGCTAAAATGTTTTCATTC | 291 |
| | 8-218 | | | | 7 |
| 21 | H45_19 | AATGAAAACATTTTAGCAGAC | 1966 | GTCTGCTAAAATGTTTTCATT | 291 |
| | 9-219 | | | | 8 |
| 21 | H45_20 | ATGAAAACATTTTAGCAGACT | 1967 | AGTCTGCTAAAATGTTTTCAT | 291 |
| | 0-220 | | | | 9 |
| 21 | H45_20 | TGAAAACATTTTAGCAGACTT | 1968 | AAGTCTGCTAAAATGTTTTCA | 292 |
| | 1-221 | | | | 0 |
| 21 | H45_20 | GAAAACATTTTAGCAGACTTT | 1969 | AAAGTCTGCTAAAATGTTTTC | 292 |
| | 2-222 | | | | 1 |
| 21 | H45_20 | AAAACATTTTAGCAGACTTTT | 1970 | AAAAGTCTGCTAAAATGTTTT | 292 |
| | 3-223 | | | | 2 |
| 21 | H45_20 | AAACATTTTAGCAGACTTTTT | 1971 | AAAAAGTCTGCTAAAATGTTT | 292 |
| | 4-224 | | | | 3 |
| 21 | H45_20 | AACATTTTAGCAGACTTTTTA | 1972 | TAAAAAGTCTGCTAAAATGTT | 292 |
| | 5-225 | | | | 4 |
| 21 | H45_20 | ACATTTTAGCAGACTTTTTAA | 1973 | TTAAAAAGTCTGCTAAAATGT | 292 |
| | 6-226 | | | | 5 |
| 21 | H45_20 | CATTTTAGCAGACTTTTTAAG | 1974 | CTTAAAAAGTCTGCTAAAATG | 292 |
| | 7-227 | | | | 6 |
| 21 | H45_20 | ATTTTAGCAGACTTTTTAAGC | 1975 | GCTTAAAAAGTCTGCTAAAAT | 292 |
| | 8-228 | | | | 7 |
| 21 | H45_20 | TTTTAGCAGACTTTTTAAGCT | 1976 | AGCTTAAAAAGTCTGCTAAAA | 292 |
| | 9-229 | | | | 8 |
| 21 | H45_21 | TTTAGCAGACTTTTTAAGCTT | 1977 | AAGCTTAAAAAGTCTGCTAAA | 292 |
| | 0-230 | | | | 9 |
| 21 | H45_21 | TTAGCAGACTTTTTAAGCTTT | 1978 | AAAGCTTAAAAAGTCTGCTAA | 293 |
| | 1-231 | | | | 0 |
| 21 | H45_21 | TAGCAGACTTTTTAAGCTTTC | 1979 | GAAAGCTTAAAAAGTCTGCTA | 293 |
| | 2-232 | | | | 1 |
| 21 | H45_21 | AGCAGACTTTTTAAGCTTTCT | 1980 | AGAAAGCTTAAAAAGTCTGCT | 293 |
| | 3-233 | | | | 2 |
| 21 | H45_21 | GCAGACTTTTTAAGCTTTCTT | 1981 | AAGAAAGCTTAAAAAGTCTGC | 293 |
| | 4-234 | | | | 3 |
| 21 | H45_21 | CAGACTTTTTAAGCTTTCTTT | 1982 | AAAGAAAGCTTAAAAAGTCTG | 293 |
| | 5-235 | | | | 4 |
| 21 | H45_21 | AGACTTTTTAAGCTTTCTTTA | 1983 | TAAAGAAAGCTTAAAAAGTCT | 293 |
| | 6-236 | | | | 5 |
| 21 | H45_21 | GACTTTTTAAGCTTTCTTTAG | 1984 | CTAAAGAAAGCTTAAAAAGTC | 293 |
| | 7-237 | | | | 6 |
| 21 | H45_21 | ACTTTTTAAGCTTTCTTTAGA | 1985 | TCTAAAGAAAGCTTAAAAAGT | 293 |
| | 8-238 | | | | 7 |
| 21 | H45_21 | CTTTTTAAGCTTTCTTTAGAA | 1986 | TTCTAAAGAAAGCTTAAAAAG | 293 |
| | 9-239 | | | | 8 |
| 21 | H45_22 | TTTTTAAGCTTTCTTTAGAAG | 1987 | CTTCTAAAGAAAGCTTAAAAA | 293 |
| | 0-240 | | | | 9 |
| 22 | H45_16 | AGACAGAAAAAAGAGGTAGGGC | 1988 | GCCCTACCTCTTTTTTCTGTCT | 294 |
| | 2-183 | | | | 0 |
| 22 | H45_16 | GACAGAAAAAAGAGGTAGGGCG | 1989 | CGCCCTACCTCTTTTTTCTGTC | 294 |
| | 3-184 | | | | 1 |
| 22 | H45_16 | ACAGAAAAAAGAGGTAGGGCGA | 1990 | TCGCCCTACCTCTTTTTTCTGT | 294 |
| | 4-185 | | | | 2 |
| 22 | H45_16 | CAGAAAAAAGAGGTAGGGCGAC | 1991 | GTCGCCCTACCTCTTTTTTCTG | 294 |
| | 5-186 | | | | 3 |
| 22 | H45_16 | AGAAAAAAGAGGTAGGGCGACA | 1992 | TGTCGCCCTACCTCTTTTTTCT | 294 |
| | 6-187 | | | | 4 |
| 22 | H45_16 | GAAAAAAGAGGTAGGGCGACAG | 1993 | CTGTCGCCCTACCTCTTTTTTC | 294 |
| | 7-188 | | | | 5 |
| 22 | H45_16 | AAAAAAGAGGTAGGGCGACAGA | 1994 | TCTGTCGCCCTACCTCTTTTTT | 294 |
| | 8-189 | | | | 6 |
| 22 | H45_16 | AAAAAGAGGTAGGGCGACAGAT | 1995 | ATCTGTCGCCCTACCTCTTTTT | 294 |
| | 9-190 | | | | 7 |
| 22 | H45_17 | AAAAGAGGTAGGGCGACAGATC | 1996 | GATCTGTCGCCCTACCTCTTTT | 294 |
| | 0-191 | | | | 8 |
| 22 | H45_17 | AAAGAGGTAGGGCGACAGATCT | 1997 | AGATCTGTCGCCCTACCTCTTT | 294 |
| | 1-192 | | | | 9 |
| 22 | H45_17 | AAGAGGTAGGGCGACAGATCTA | 1998 | TAGATCTGTCGCCCTACCTCTT | 295 |
| | 2-193 | | | | 0 |
| 22 | H45_17 | AGAGGTAGGGCGACAGATCTAA | 1999 | TTAGATCTGTCGCCCTACCTCT | 295 |
| | 3-194 | | | | 1 |
| 22 | H45_17 | GAGGTAGGGCGACAGATCTAAT | 2000 | ATTAGATCTGTCGCCCTACCTC | 295 |
| | 4-195 | | | | 2 |
| 22 | H45_17 | AGGTAGGGCGACAGATCTAATA | 2001 | TATTAGATCTGTCGCCCTACCT | 295 |
| | 5-196 | | | | 3 |
| 22 | H45_17 | GGTAGGGCGACAGATCTAATAG | 2002 | CTATTAGATCTGTCGCCCTACC | 295 |
| | 6-197 | | | | 4 |
| 22 | H45_17 | GTAGGGCGACAGATCTAATAGG | 2003 | CCTATTAGATCTGTCGCCCTAC | 295 |
| | 7-198 | | | | 5 |
| 22 | H45_17 | TAGGGCGACAGATCTAATAGGA | 2004 | TCCTATTAGATCTGTCGCCCTA | 295 |
| | 8-199 | | | | 6 |
| 22 | H45_17 | AGGGCGACAGATCTAATAGGAA | 2005 | TTCCTATTAGATCTGTCGCCCT | 295 |
| | 9-200 | | | | 7 |
| 22 | H45_18 | GGGCGACAGATCTAATAGGAAT | 2006 | ATTCCTATTAGATCTGTCGCCC | 295 |
| | 0-201 | | | | 8 |
| 22 | H45_18 | GGCGACAGATCTAATAGGAATG | 2007 | CATTCCTATTAGATCTGTCGCC | 295 |
| | 1-202 | | | | 9 |
| 22 | H45_18 | GCGACAGATCTAATAGGAATGA | 2008 | TCATTCCTATTAGATCTGTCGC | 296 |
| | 2-203 | | | | 0 |
| 22 | H45_18 | CGACAGATCTAATAGGAATGAA | 2009 | TTCATTCCTATTAGATCTGTCG | 296 |
| | 3-204 | | | | 1 |
| 22 | H45_18 | GACAGATCTAATAGGAATGAAA | 2010 | TTTCATTCCTATTAGATCTGTC | 296 |
| | 4-205 | | | | 2 |
| 22 | H45_18 | ACAGATCTAATAGGAATGAAAA | 2011 | TTTTCATTCCTATTAGATCTGT | 296 |
| | 5-206 | | | | 3 |
| 22 | H45_18 | CAGATCTAATAGGAATGAAAAC | 2012 | GTTTTCATTCCTATTAGATCTG | 296 |
| | 6-207 | | | | 4 |
| 22 | H45_18 | AGATCTAATAGGAATGAAAACA | 2013 | TGTTTTCATTCCTATTAGATCT | 296 |
| | 7-208 | | | | 5 |
| 22 | H45_18 | GATCTAATAGGAATGAAAACAT | 2014 | ATGTTTTCATTCCTATTAGATC | 296 |
| | 8-209 | | | | 6 |
| 22 | H45_18 | ATCTAATAGGAATGAAAACATT | 2015 | AATGTTTTCATTCCTATTAGAT | 296 |
| | 9-210 | | | | 7 |
| 22 | H45_19 | TCTAATAGGAATGAAAACATTT | 2016 | AAATGTTTTCATTCCTATTAGA | 296 |
| | 0-211 | | | | 8 |
| 22 | H45_19 | CTAATAGGAATGAAAACATTTT | 2017 | AAAATGTTTTCATTCCTATTAG | 296 |
| | 1-212 | | | | 9 |
| 22 | H45_19 | TAATAGGAATGAAAACATTTTA | 2018 | TAAAATGTTTTCATTCCTATTA | 297 |
| | 2-213 | | | | 0 |
| 22 | H45_19 | AATAGGAATGAAAACATTTTAG | 2019 | CTAAAATGTTTTCATTCCTATT | 297 |
| | 3-214 | | | | 1 |
| 22 | H45_19 | ATAGGAATGAAAACATTTTAGC | 2020 | GCTAAAATGTTTTCATTCCTAT | 297 |
| | 4-215 | | | | 2 |
| 22 | H45_19 | TAGGAATGAAAACATTTTAGCA | 2021 | TGCTAAAATGTTTTCATTCCTA | 297 |
| | 5-216 | | | | 3 |
| 22 | H45_19 | AGGAATGAAAACATTTTAGCAG | 2022 | CTGCTAAAATGTTTTCATTCCT | 297 |
| | 6-217 | | | | 4 |
| 22 | H45_19 | GGAATGAAAACATTTTAGCAGA | 2023 | TCTGCTAAAATGTTTTCATTCC | 297 |
| | 7-218 | | | | 5 |
| 22 | H45_19 | GAATGAAAACATTTTAGCAGAC | 2024 | GTCTGCTAAAATGTTTTCATTC | 297 |
| | 8-219 | | | | 6 |
| 22 | H45_19 | AATGAAAACATTTTAGCAGACT | 2025 | AGTCTGCTAAAATGTTTTCATT | 297 |
| | 9-220 | | | | 7 |
| 22 | H45_20 | ATGAAAACATTTTAGCAGACTT | 2026 | AAGTCTGCTAAAATGTTTTCAT | 297 |
| | 0-221 | | | | 8 |
| 22 | H45_20 | TGAAAACATTTTAGCAGACTTT | 2027 | AAAGTCTGCTAAAATGTTTTCA | 297 |
| | 1-222 | | | | 9 |
| 22 | H45_20 | GAAAACATTTTAGCAGACTTTT | 2028 | AAAAGTCTGCTAAAATGTTTTC | 298 |
| | 2-223 | | | | 0 |
| 22 | H45_20 | AAAACATTTTAGCAGACTTTTT | 2029 | AAAAAGTCTGCTAAAATGTTTT | 298 |
| | 3-224 | | | | 1 |
| 22 | H45_20 | AAACATTTTAGCAGACTTTTTA | 2030 | TAAAAAGTCTGCTAAAATGTTT | 298 |
| | 4-225 | | | | 2 |
| 22 | H45_20 | AACATTTTAGCAGACTTTTTAA | 2031 | TTAAAAAGTCTGCTAAAATGTT | 298 |
| | 5-226 | | | | 3 |
| 22 | H45_20 | ACATTTTAGCAGACTTTTTAAG | 2032 | CTTAAAAAGTCTGCTAAAATGT | 298 |
| | 6-227 | | | | 4 |
| 22 | H45_20 | CATTTTAGCAGACTTTTTAAGC | 2033 | GCTTAAAAAGTCTGCTAAAATG | 298 |
| | 7-228 | | | | 5 |
| 22 | H45_20 | ATTTTAGCAGACTTTTTAAGCT | 2034 | AGCTTAAAAAGTCTGCTAAAAT | 298 |
| | 8-229 | | | | 6 |
| 22 | H45_20 | TTTTAGCAGACTTTTTAAGCTT | 2035 | AAGCTTAAAAAGTCTGCTAAAA | 298 |
| | 9-230 | | | | 7 |
| 22 | H45_21 | TTTAGCAGACTTTTTAAGCTTT | 2036 | AAAGCTTAAAAAGTCTGCTAAA | 298 |
| | 0-231 | | | | 8 |
| 22 | H45_21 | TTAGCAGACTTTTTAAGCTTTC | 2037 | GAAAGCTTAAAAAGTCTGCTAA | 298 |
| | 1-232 | | | | 9 |
| 22 | H45_21 | TAGCAGACTTTTTAAGCTTTCT | 2038 | AGAAAGCTTAAAAAGTCTGCTA | 299 |
| | 2-233 | | | | 0 |
| 22 | H45_21 | AGCAGACTTTTTAAGCTTTCTT | 2039 | AAGAAAGCTTAAAAAGTCTGCT | 299 |
| | 3-234 | | | | 1 |
| 22 | H45_21 | GCAGACTTTTTAAGCTTTCTTT | 2040 | AAAGAAAGCTTAAAAAGTCTGC | 299 |
| | 4-235 | | | | 2 |
| 22 | H45_21 | CAGACTTTTTAAGCTTTCTTTA | 2041 | TAAAGAAAGCTTAAAAAGTCTG | 299 |
| | 5-236 | | | | 3 |
| 22 | H45_21 | AGACTTTTTAAGCTTTCTTTAG | 2042 | CTAAAGAAAGCTTAAAAAGTCT | 299 |
| | 6-237 | | | | 4 |
| 22 | H45_21 | GACTTTTTAAGCTTTCTTTAGA | 2043 | TCTAAAGAAAGCTTAAAAAGTC | 299 |
| | 7-238 | | | | 5 |
| 22 | H45_21 | ACTTTTTAAGCTTTCTTTAGAA | 2044 | TTCTAAAGAAAGCTTAAAAAGT | 299 |
| | 8-239 | | | | 6 |
| 22 | H45_21 | CTTTTTAAGCTTTCTTTAGAAG | 2045 | CTTCTAAAGAAAGCTTAAAAAG | 299 |
| | 9-240 | | | | 7 |
| 22 | H45_22 | TTTTTAAGCTTTCTTTAGAAGA | 2046 | TCTTCTAAAGAAAGCTTAAAAA | 299 |
| | 0-241 | | | | 8 |
| 23 | H45_16 | CAGACAGAAAAAAGAGGTAGGGC | 2047 | GCCCTACCTCTTTTTTCTGTCTG | 299 |
| | 1-183 | | | | 9 |
| 23 | H45_16 | AGACAGAAAAAAGAGGTAGGGCG | 2048 | CGCCCTACCTCTTTTTTCTGTCT | 300 |
| | 2-184 | | | | 0 |
| 23 | H45_16 | GACAGAAAAAAGAGGTAGGGCGA | 2049 | TCGCCCTACCTCTTTTTTCTGTC | 300 |
| | 3-185 | | | | 1 |
| 23 | H45_16 | ACAGAAAAAAGAGGTAGGGCGAC | 2050 | GTCGCCCTACCTCTTTTTTCTGT | 300 |
| | 4-186 | | | | 2 |
| 23 | H45_16 | CAGAAAAAAGAGGTAGGGCGACA | 2051 | TGTCGCCCTACCTCTTTTTTCTG | 300 |
| | 5-187 | | | | 3 |
| 23 | H45_16 | AGAAAAAAGAGGTAGGGCGACAG | 2052 | CTGTCGCCCTACCTCTTTTTTCT | 300 |
| | 6-188 | | | | 4 |
| 23 | H45_16 | GAAAAAAGAGGTAGGGCGACAGA | 2053 | TCTGTCGCCCTACCTCTTTTTTC | 300 |
| | 7-189 | | | | 5 |
| 23 | H45_16 | AAAAAAGAGGTAGGGCGACAGAT | 2054 | ATCTGTCGCCCTACCTCTTTTTT | 300 |
| | 8-190 | | | | 6 |
| 23 | H45_16 | AAAAAGAGGTAGGGCGACAGATC | 2055 | GATCTGTCGCCCTACCTCTTTTT | 300 |
| | 9-191 | | | | 7 |
| 23 | H45_17 | AAAAGAGGTAGGGCGACAGATCT | 2056 | AGATCTGTCGCCCTACCTCTTTT | 300 |
| | 0-192 | | | | 8 |
| 23 | H45_17 | AAAGAGGTAGGGCGACAGATCTA | 2057 | TAGATCTGTCGCCCTACCTCTTT | 300 |
| | 1-193 | | | | 9 |
| 23 | H45_17 | AAGAGGTAGGGCGACAGATCTAA | 2058 | TTAGATCTGTCGCCCTACCTCTT | 301 |
| | 2-194 | | | | 0 |
| 23 | H45_17 | AGAGGTAGGGCGACAGATCTAAT | 2059 | ATTAGATCTGTCGCCCTACCTCT | 301 |
| | 3-195 | | | | 1 |
| 23 | H45_17 | GAGGTAGGGCGACAGATCTAATA | 2060 | TATTAGATCTGTCGCCCTACCTC | 301 |
| | 4-196 | | | | 2 |
| 23 | H45_17 | AGGTAGGGCGACAGATCTAATAG | 2061 | CTATTAGATCTGTCGCCCTACCT | 301 |
| | 5-197 | | | | 3 |
| 23 | h45_17 | GGTAGGGCGACAGATCTAATAGG | 2062 | CCTATTAGATCTGTCGCCCTACC | 301 |
| | 6-198 | | | | 4 |
| 23 | H45_17 | GTAGGGCGACAGATCTAATAGGA | 2063 | TCCTATTAGATCTGTCGCCCTAC | 301 |
| | 7-199 | | | | 5 |
| 23 | H45_17 | TAGGGCGACAGATCTAATAGGAA | 2064 | TTCCTATTAGATCTGTCGCCCTA | 301 |
| | 8-200 | | | | 6 |
| 23 | H45_17 | AGGGCGACAGATCTAATAGGAAT | 2065 | ATTCCTATTAGATCTGTCGCCCT | 301 |
| | 9-201 | | | | 7 |
| 23 | H45_18 | GGGCGACAGATCTAATAGGAATG | 2066 | CATTCCTATTAGATCTGTCGCCC | 301 |
| | 0-202 | | | | 8 |
| 23 | H45_18 | GGCGACAGATCTAATAGGAATGA | 2067 | TCATTCCTATTAGATCTGTCGCC | 301 |
| | 1-203 | | | | 9 |
| 23 | H45_18 | GCGACAGATCTAATAGGAATGAA | 2068 | TTCATTCCTATTAGATCTGTCGC | 302 |
| | 2-204 | | | | 0 |
| 23 | H45_18 | CGACAGATCTAATAGGAATGAAA | 2069 | TTTCATTCCTATTAGATCTGTCG | 302 |
| | 3-205 | | | | 1 |
| 23 | H45_18 | GACAGATCTAATAGGAATGAAAA | 2070 | TTTTCATTCCTATTAGATCTGTC | 302 |
| | 4-206 | | | | 2 |
| 23 | H45_18 | ACAGATCTAATAGGAATGAAAAC | 2071 | GTTTTCATTCCTATTAGATCTGT | 302 |
| | 5-207 | | | | 3 |
| 23 | H45_18 | CAGATCTAATAGGAATGAAAACA | 2072 | TGTTTTCATTCCTATTAGATCTG | 302 |
| | 6-208 | | | | 4 |
| 23 | H45_18 | AGATCTAATAGGAATGAAAACAT | 2073 | ATGTTTTCATTCCTATTAGATCT | 302 |
| | 7-209 | | | | 5 |
| 23 | H45_18 | GATCTAATAGGAATGAAAACATT | 2074 | AATGTTTTCATTCCTATTAGATC | 302 |
| | 8-210 | | | | 6 |
| 23 | H45_18 | ATCTAATAGGAATGAAAACATTT | 2075 | AAATGTTTTCATTCCTATTAGAT | 302 |
| | 9-211 | | | | 7 |
| 23 | H45_19 | TCTAATAGGAATGAAAACATTTT | 2076 | AAAATGTTTTCATTCCTATTAGA | 302 |
| | 0-212 | | | | 8 |
| 23 | H45_19 | CTAATAGGAATGAAAACATTTTA | 2077 | TAAAATGTTTTCATTCCTATTAG | 302 |
| | 1-213 | | | | 9 |
| 23 | H15_19 | TAATAGGAATGAAAACATTTTAG | 2078 | CTAAAATGTTTTCATTCCTATTA | 303 |
| | 2-214 | | | | 0 |
| 23 | H45_19 | AATAGGAATGAAAACATTTTAGC | 2079 | GCTAAAATGTTTTCATTCCTATT | 303 |
| | 3-215 | | | | 1 |
| 23 | H45_19 | ATAGGAATGAAAACATTTTAGCA | 2080 | TGCTAAAATGTTTTCATTCCTAT | 303 |
| | 4-216 | | | | 2 |
| 23 | H45_19 | TAGGAATGAAAACATTTTAGCAG | 2081 | CTGCTAAAATGTTTTCATTCCTA | 303 |
| | 5-217 | | | | 3 |
| 23 | H45_19 | AGGAATGAAAACATTTTAGCAGA | 2082 | TCTGCTAAAATGTTTTCATTCCT | 303 |
| | 6-218 | | | | 4 |
| 23 | H45_19 | GGAATGAAAACATTTTAGCAGAC | 2083 | GTCTGCTAAAATGTTTTCATTCC | 303 |
| | 7-219 | | | | 5 |
| 23 | H45_19 | GAATGAAAACATTTTAGCAGACT | 2084 | AGTCTGCTAAAATGTTTTCATTC | 303 |
| | 8-220 | | | | 6 |
| 23 | H45_19 | AATGAAAACATTTTAGCAGACTT | 2085 | AAGTCTGCTAAAATGTTTTCATT | 303 |
| | 9-221 | | | | 7 |
| 23 | H45_20 | ATGAAAACATTTTAGCAGACTTT | 2086 | AAAGTCTGCTAAAATGTTTTCAT | 303 |
| | 0-222 | | | | 8 |
| 23 | H45_20 | TGAAAACATTTTAGCAGACTTTT | 2087 | AAAAGTCTGCTAAAATGTTTTCA | 303 |
| | 1-223 | | | | 9 |
| 23 | H45_20 | GAAAACATTTTAGCAGACTTTTT | 2088 | AAAAAGTCTGCTAAAATGTTTTC | 304 |
| | 2-224 | | | | 0 |
| 23 | H45_20 | AAAACATTTTAGCAGACTTTTTA | 2089 | TAAAAAGTCTGCTAAAATGTTTT | 304 |
| | 3-225 | | | | 1 |
| 23 | H45_20 | AAACATTTTAGCAGACTTTTTAA | 2090 | TTAAAAAGTCTGCTAAAATGTTT | 304 |
| | 4-226 | | | | 2 |
| 23 | H45_20 | AACATTTTAGCAGACTTTTTAAG | 2091 | CTTAAAAAGTCTGCTAAAATGTT | 304 |
| | 5-227 | | | | 3 |
| 23 | H45_20 | ACATTTTAGCAGACTTTTTAAGC | 2092 | GCTTAAAAAGTCTGCTAAAATGT | 304 |
| | 6-228 | | | | 4 |
| 23 | H45_20 | CATTTTAGCAGACTTTTTAAGCT | 2093 | AGCTTAAAAAGTCTGCTAAAATG | 304 |
| | 7-229 | | | | 5 |
| 23 | H45_20 | ATTTTAGCAGACTTTTTAAGCTT | 2094 | AAGCTTAAAAAGTCTGCTAAAAT | 304 |
| | 8-230 | | | | 6 |
| 23 | H45_20 | TTTTAGCAGACTTTTTAAGCTTT | 2095 | AAAGCTTAAAAAGTCTGCTAAAA | 304 |
| | 9-231 | | | | 7 |
| 23 | H45_21 | TTTAGCAGACTTTTTAAGCTTTC | 2096 | GAAAGCTTAAAAAGTCTGCTAAA | 304 |
| | 0-232 | | | | 8 |
| 23 | H45_21 | TTAGCAGACTTTTTAAGCTTTCT | 2097 | AGAAAGCTTAAAAAGTCTGCTAA | 304 |
| | 1-233 | | | | 9 |
| 23 | H45_21 | TAGCAGACTTTTTAAGCTTTCTT | 2098 | AAGAAAGCTTAAAAAGTCTGCTA | 305 |
| | 2-234 | | | | 0 |
| 23 | H45_21 | AGCAGACTTTTTAAGCTTTCTTT | 2099 | AAAGAAAGCTTAAAAAGTCTGCT | 305 |
| | 3-235 | | | | 1 |
| 23 | H45_21 | GCAGACTTTTTAAGCTTTCTTTA | 2100 | TAAAGAAAGCTTAAAAAGTCTGC | 305 |
| | 4-236 | | | | 2 |
| 23 | H45_21 | CAGACTTTTTAAGCTTTCTTTAG | 2101 | CTAAAGAAAGCTTAAAAAGTCTG | 305 |
| | 5-237 | | | | 3 |
| 23 | H45_21 | AGACTTTTTAAGCTTTCTTTAGA | 2102 | TCTAAAGAAAGCTTAAAAAGTCT | 305 |
| | 6-238 | | | | 4 |
| 23 | H45_21 | GACTTTTTAAGCTTTCTTTAGAA | 2103 | TTCTAAAGAAAGCTTAAAAAGTC | 305 |
| | 7-239 | | | | 5 |
| 23 | H45_21 | ACTTTTTAAGCTTTCTTTAGAAG | 2104 | CTTCTAAAGAAAGCTTAAAAAGT | 305 |
| | 8-240 | | | | 6 |
| 23 | H45_21 | CTTTTTAAGCTTTCTTTAGAAGA | 2105 | TCTTCTAAAGAAAGCTTAAAAAG | 305 |
| | 9-241 | | | | 7 |
| 23 | H45_22 | TTTTTAAGCTTTCTTTAGAAGAA | 2106 | TTCTTCTAAAGAAAGCTTAAAAA | 305 |
| | 0-242 | | | | 8 |
| 24 | H45_16 | TCAGACAGAAAAAAGAGGTAGGG | 2107 | GCCCTACCTCTTTTTTCTGTCTG | 305 |
| | 0-183 | C | | A | 9 |
| 24 | H45_16 | CAGACAGAAAAAAGAGGTAGGGC | 2108 | CGCCCTACCTCTTTTTTCTGTCT | 306 |
| | 1-184 | G | | G | 0 |
| 24 | H45_16 | AGACAGAAAAAAGAGGTAGGGCG | 2109 | TCGCCCTACCTCTTTTTTCTGTC | 306 |
| | 2-185 | A | | T | 1 |
| 24 | H45_16 | GACAGAAAAAAGAGGTAGGGCGA | 2110 | GTCGCCCTACCTCTTTTTTCTGT | 306 |
| | 3-186 | C | | C | 2 |
| 24 | H45_16 | ACAGAAAAAAGAGGTAGGGCGAC | 2111 | TGTCGCCCTACCTCTTTTTTCTG | 306 |
| | 4-187 | A | | T | 3 |
| 24 | H45_16 | CAGAAAAAAGAGGTAGGGCGACA | 2112 | CTGTCGCCCTACCTCTTTTTTCT | 306 |
| | 5-188 | G | | G | 4 |
| 24 | H45_16 | AGAAAAAAGAGGTAGGGCGACAG | 2113 | TCTGTCGCCCTACCTCTTTTTTC | 306 |
| | 6-189 | A | | T | 5 |
| 24 | H45_16 | GAAAAAAGAGGTAGGGCGACAGA | 2114 | ATCTGTCGCCCTACCTCTTTTTT | 306 |
| | 7-190 | T | | C | 6 |
| 24 | H45_16 | AAAAAAGAGGTAGGGCGACAGAT | 2115 | GATCTGTCGCCCTACCTCTTTTT | 306 |
| | 8-191 | C | | T | 7 |
| 24 | H45_16 | AAAAAGAGGTAGGGCGACAGATC | 2116 | AGATCTGTCGCCCTACCTCTTTT | 306 |
| | 9-192 | T | | T | 8 |
| 24 | H45_17 | AAAAGAGGTAGGGCGACAGATCT | 2117 | TAGATCTGTCGCCCTACCTCTTT | 306 |
| | 0-193 | A | | T | 9 |
| 24 | H45_17 | AAAGAGGTAGGGCGACAGATCTA | 2118 | TTAGATCTGTCGCCCTACCTCTT | 307 |
| | 1-194 | A | | T | 0 |
| 24 | H45_17 | AAGAGGTAGGGCGACAGATCTAA | 2119 | ATTAGATCTGTCGCCCTACCTCT | 307 |
| | 2-195 | T | | T | 1 |
| 24 | H45_17 | AGAGGTAGGGCGACAGATCTAAT | 2120 | TATTAGATCTGTCGCCCTACCTC | 307 |
| | 3-196 | A | | T | 2 |
| 24 | H45_17 | GAGGTAGGGCGACAGATCTAATA | 2121 | CTATTAGATCTGTCGCCCTACCT | 307 |
| | 4-197 | G | | C | 3 |
| 24 | H45_17 | AGGTAGGGCGACAGATCTAATAG | 2122 | CCTATTAGATCTGTCGCCCTACC | 307 |
| | 5-198 | G | | T | 4 |
| 24 | H45_17 | GGTAGGGCGACAGATCTAATAGG | 2123 | TCCTATTAGATCTGTCGCCCTAC | 307 |
| | 6-199 | A | | C | 5 |
| 24 | H45_17 | GTAGGGCGACAGATCTAATAGGA | 2124 | TTCCTATTAGATCTGTCGCCCTA | 307 |
| | 7-200 | A | | C | 6 |
| 24 | H45_17 | TAGGGCGACAGATCTAATAGGAA | 2125 | ATTCCTATTAGATCTGTCGCCCT | 307 |
| | 8-201 | T | | A | 7 |
| 24 | H45_17 | AGGGCGACAGATCTAATAGGAAT | 2126 | CATTCCTATTAGATCTGTCGCCC | 307 |
| | 9-202 | G | | T | 8 |
| 24 | H45_18 | GGGCGACAGATCTAATAGGAATG | 2127 | TCATTCCTATTAGATCTGTCGCC | 307 |
| | 0-203 | A | | C | 9 |
| 24 | H45_18 | GGCGACAGATCTAATAGGAATGA | 2128 | TTCATTCCTATTAGATCTGTCGC | 308 |
| | 1-204 | A | | C | 0 |
| 24 | H45_18 | GCGACAGATCTAATAGGAATGAA | 2129 | TTTCATTCCTATTAGATCTGTCG | 308 |
| | 2-205 | A | | C | 1 |
| 24 | H45_18 | CGACAGATCTAATAGGAATGAAA | 2130 | TTTTCATTCCTATTAGATCTGTC | 308 |
| | 3-206 | A | | G | 2 |
| 24 | H45_18 | GACAGATCTAATAGGAATGAAAA | 2131 | GTTTTCATTCCTATTAGATCTGT | 308 |
| | 4-207 | C | | C | 3 |
| 24 | H45_18 | ACAGATCTAATAGGAATGAAAAC | 2132 | TGTTTTCATTCCTATTAGATCTG | 308 |
| | 5-208 | A | | T | 4 |
| 24 | H45_18 | CAGATCTAATAGGAATGAAAACA | 2133 | ATGTTTTCATTCCTATTAGATCT | 308 |
| | 6-209 | T | | G | 5 |
| 24 | H45_18 | AGATCTAATAGGAATGAAAACAT | 2134 | AATGTTTTCATTCCTATTAGATC | 308 |
| | 7-210 | T | | T | 6 |
| 24 | H45_18 | GATCTAATAGGAATGAAAACATT | 2135 | AAATGTTTTCATTCCTATTAGAT | 308 |
| | 8-211 | T | | C | 7 |
| 24 | H45_18 | ATCTAATAGGAATGAAAACATTT | 2136 | AAAATGTTTTCATTCCTATTAGA | 308 |
| | 9-212 | T | | T | 8 |
| 24 | H45_19 | TCTAATAGGAATGAAAACATTTT | 2137 | TAAAATGTTTTCATTCCTATTAG | 308 |
| | 0-213 | A | | A | 9 |
| 24 | H45_19 | CTAATAGGAATGAAAACATTTTA | 2138 | CTAAAATGTTTTCATTCCTATTA | 309 |
| | 1-214 | G | | G | 0 |
| 24 | H45_19 | TAATAGGAATGAAAACATTTTAG | 2139 | GCTAAAATGTTTTCATTCCTATT | 309 |
| | 2-215 | C | | A | 1 |
| 24 | H45_19 | AATAGGAATGAAAACATTTTAGC | 2140 | TGCTAAAATGTTTTCATTCCTAT | 309 |
| | 3-216 | A | | T | 2 |
| 24 | H45_19 | ATAGGAATGAAAACATTTTAGCA | 2141 | CTGCTAAAATGTTTTCATTCCTA | 309 |
| | 4-217 | G | | T | 3 |
| 24 | H45_19 | TAGGAATGAAAACATTTTAGCAG | 2142 | TCTGCTAAAATGTTTTCATTCCT | 309 |
| | 5-218 | A | | A | 4 |
| 24 | H45_19 | AGGAATGAAAACATTTTAGCAGA | 2143 | GTCTGCTAAAATGTTTTCATTCC | 309 |
| | 6-219 | C | | T | 5 |
| 24 | H45_19 | GGAATGAAAACATTTTAGCAGAC | 2144 | AGTCTGCTAAAATGTTTTCATTC | 309 |
| | 7-220 | T | | C | 6 |
| 24 | H45_19 | GAATGAAAACATTTTAGCAGACT | 2145 | AAGTCTGCTAAAATGTTTTCATT | 309 |
| | 8-221 | T | | C | 7 |
| 24 | H45_19 | AATGAAAACATTTTAGCAGACTT | 2146 | AAAGTCTGCTAAAATGTTTTCAT | 309 |
| | 9-222 | T | | T | 8 |
| 24 | H45_20 | ATGAAAACATTTTAGCAGACTTT | 2147 | AAAAGTCTGCTAAAATGTTTTCA | 309 |
| | 0-223 | T | | T | 9 |
| 24 | H45_20 | TGAAAACATTTTAGCAGACTTTT | 2148 | AAAAAGTCTGCTAAAATGTTTTC | 310 |
| | 1-224 | T | | A | 0 |
| 24 | H45_20 | GAAAACATTTTAGCAGACTTTTT | 2149 | TAAAAAGTCTGCTAAAATGTTTT | 310 |
| | 2-225 | A | | C | 1 |
| 24 | H45_20 | AAAACATTTTAGCAGACTTTTTA | 2150 | TTAAAAAGTCTGCTAAAATGTTT | 310 |
| | 3-226 | A | | T | 2 |
| 24 | H45_20 | AAACATTTTAGCAGACTTTTTAA | 2151 | CTTAAAAAGTCTGCTAAAATGTT | 310 |
| | 4-227 | G | | T | 3 |
| 24 | H45_20 | AACATTTTAGCAGACTTTTTAAG | 2152 | GCTTAAAAAGTCTGCTAAAATGT | 310 |
| | 5-228 | C | | T | 4 |
| 24 | H45_20 | ACATTTTAGCAGACTTTTTAAGC | 2153 | AGCTTAAAAAGTCTGCTAAAATG | 310 |
| | 6-229 | T | | T | 5 |
| 24 | H45_20 | CATTTTAGCAGACTTTTTAAGCT | 2154 | AAGCTTAAAAAGTCTGCTAAAAT | 310 |
| | 7-230 | T | | G | 6 |
| 24 | H45_20 | ATTTTAGCAGACTTTTTAAGCTT | 2155 | AAAGCTTAAAAAGTCTGCTAAAA | 310 |
| | 8-231 | T | | T | 7 |
| 24 | H45_20 | TTTTAGCAGACTTTTTAAGCTTT | 2156 | GAAAGCTTAAAAAGTCTGCTAAA | 310 |
| | 9-232 | C | | A | 8 |
| 24 | H45_21 | TTTAGCAGACTTTTTAAGCTTTC | 2157 | AGAAAGCTTAAAAAGTCTGCTAA | 310 |
| | 0-233 | T | | A | 9 |
| 24 | H45_21 | TTAGCAGACTTTTTAAGCTTTCT | 2158 | AAGAAAGCTTAAAAAGTCTGCTA | 311 |
| | 1-234 | T | | A | 0 |
| 24 | H45_21 | TAGCAGACTTTTTAAGCTTTCTT | 2159 | AAAGAAAGCTTAAAAAGTCTGCT | 311 |
| | 2-235 | T | | A | 1 |
| 24 | H45_21 | AGCAGACTTTTTAAGCTTTCTTT | 2160 | TAAAGAAAGCTTAAAAAGTCTGC | 311 |
| | 3-236 | A | | T | 2 |
| 24 | H45_21 | GCAGACTTTTTAAGCTTTCTTTA | 2161 | CTAAAGAAAGCTTAAAAAGTCTG | 311 |
| | 4-237 | G | | C | 3 |
| 24 | H45_21 | CAGACTTTTTAAGCTTTCTTTAG | 2162 | TCTAAAGAAAGCTTAAAAAGTCT | 311 |
| | 5-238 | A | | G | 4 |
| 24 | H45_21 | AGACTTTTTAAGCTTTCTTTAGA | 2163 | TTCTAAAGAAAGCTTAAAAAGTC | 311 |
| | 6-239 | A | | T | 5 |
| 24 | H45_21 | GACTTTTTAAGCTTTCTTTAGAA | 2164 | CTTCTAAAGAAAGCTTAAAAAGT | 311 |
| | 7-240 | G | | C | 6 |
| 24 | H45_21 | ACTTTTTAAGCTTTCTTTAGAAG | 2165 | TCTTCTAAAGAAAGCTTAAAAAG | 311 |
| | 8-241 | A | | T | 7 |
| 24 | H45_21 | CTTTTTAAGCTTTCTTTAGAAGA | 2166 | TTCTTCTAAAGAAAGCTTAAAAA | 311 |
| | 9-242 | A | | G | 8 |
| 24 | H45_22 | TTTTTAAGCTTTCTTTAGAAGAA | 2167 | ATTCTTCTAAAGAAAGCTTAAAA | 311 |
| | 0-243 | T | | A | 9 |
| 25 | H45_15 | GTCAGACAGAAAAAAGAGGTAGG | 2168 | GCCCTACCTCTTTTTTCTGTCTG | 312 |
| | 9-183 | GC | | AC | 0 |
| 25 | H45_16 | TCAGACAGAAAAAAGAGGTAGGG | 2169 | CGCCCTACCTCTTTTTTCTGTCT | 312 |
| | 0-184 | CG | | GA | 1 |
| 25 | H45_16 | CAGACAGAAAAAAGAGGTAGGGC | 2170 | TCGCCCTACCTCTTTTTTCTGTC | 312 |
| | 1-185 | GA | | TG | 2 |
| 25 | H45_16 | AGACAGAAAAAAGAGGTAGGGCG | 2171 | GTCGCCCTACCTCTTTTTTCTGT | 312 |
| | 2-186 | AC | | CT | 3 |
| 25 | H45_16 | GACAGAAAAAAGAGGTAGGGCGA | 2172 | TGTCGCCCTACCTCTTTTTTCTG | 312 |
| | 3-187 | CA | | TC | 4 |
| 25 | H45_16 | ACAGAAAAAAGAGGTAGGGCGAC | 2173 | CTGTCGCCCTACCTCTTTTTTCT | 312 |
| | 4-188 | AG | | GT | 5 |
| 25 | H45_16 | CAGAAAAAAGAGGTAGGGCGACA | 2174 | TCTGTCGCCCTACCTCTTTTTTC | 312 |
| | 5-189 | GA | | TG | 6 |
| 25 | H45_16 | AGAAAAAAGAGGTAGGGCGACAG | 2175 | ATCTGTCGCCCTACCTCTTTTTT | 312 |
| | 6-190 | AT | | CT | 7 |
| 25 | H45_16 | GAAAAAAGAGGTAGGGCGACAGA | 2176 | GATCTGTCGCCCTACCTCTTTTT | 312 |
| | 7-191 | TC | | TC | 8 |
| 25 | H45_16 | AAAAAAGAGGTAGGGCGACAGAT | 2177 | AGATCTGTCGCCCTACCTCTTTT | 312 |
| | 8-192 | CT | | TT | 9 |
| 25 | H45_16 | AAAAAGAGGTAGGGCGACAGATC | 2178 | TAGATCTGTCGCCCTACCTCTTT | 313 |
| | 9-193 | TA | | TT | 0 |
| 25 | H45_17 | AAAAGAGGTAGGGCGACAGATCT | 2179 | TTAGATCTGTCGCCCTACCTCTT | 313 |
| | 0-194 | AA | | TT | 1 |
| 25 | H45_17 | AAAGAGGTAGGGCGACAGATCTA | 2180 | ATTAGATCTGTCGCCCTACCTCT | 313 |
| | 1-195 | AT | | TT | 2 |
| 25 | H45_17 | AAGAGGTAGGGCGACAGATCTAA | 2181 | TATTAGATCTGTCGCCCTACCTC | 313 |
| | 2-196 | TA | | TT | 3 |
| 25 | H45_17 | AGAGGTAGGGCGACAGATCTAAT | 2182 | CTATTAGATCTGTCGCCCTACCT | 313 |
| | 3-197 | AG | | CT | 4 |
| 25 | H45_17 | GAGGTAGGGCGACAGATCTAATA | 2183 | CCTATTAGATCTGTCGCCCTACC | 313 |
| | 4-198 | GG | | TC | 5 |
| 25 | H45_17 | AGGTAGGGCGACAGATCTAATAG | 2184 | TCCTATTAGATCTGTCGCCCTAC | 313 |
| | 5-199 | GA | | CT | 6 |
| 25 | H45_17 | GGTAGGGCGACAGATCTAATAGG | 2185 | TTCCTATTAGATCTGTCGCCCTA | 313 |
| | 6-200 | AA | | CC | 7 |
| 25 | H45_17 | GTAGGGCGACAGATCTAATAGGA | 2186 | ATTCCTATTAGATCTGTCGCCCT | 313 |
| | 7-201 | AT | | AC | 8 |
| 25 | H45_17 | TAGGGCGACAGATCTAATAGGAA | 2187 | CATTCCTATTAGATCTGTCGCCC | 313 |
| | 8-202 | TG | | TA | 9 |
| 25 | H45_17 | AGGGCGACAGATCTAATAGGAAT | 2188 | TCATTCCTATTAGATCTGTCGCC | 314 |
| | 9-203 | GA | | CT | 0 |
| 25 | H45_18 | GGGCGACAGATCTAATAGGAATG | 2189 | TTCATTCCTATTAGATCTGTCGC | 314 |
| | 0-204 | AA | | CC | 1 |
| 25 | H45_18 | GGCGACAGATCTAATAGGAATGA | 2190 | TTTCATTCCTATTAGATCTGTCG | 314 |
| | 1-205 | AA | | CC | 2 |
| 25 | H45_18 | GCGACAGATCTAATAGGAATGAA | 2191 | TTTTCATTCCTATTAGATCTGTC | 314 |
| | 2-206 | AA | | GC | 3 |
| 25 | H45_18 | CGACAGATCTAATAGGAATGAAA | 2192 | GTTTTCATTCCTATTAGATCTGT | 314 |
| | 3-207 | AC | | CG | 4 |
| 25 | H45_18 | GACAGATCTAATAGGAATGAAAA | 2193 | TGTTTTCATTCCTATTAGATCTG | 314 |
| | 4-208 | CA | | TC | 5 |
| 25 | H45_18 | ACAGATCTAATAGGAATGAAAAC | 2194 | ATGTTTTCATTCCTATTAGATCT | 314 |
| | 5-209 | AT | | GT | 6 |
| 25 | H45_18 | CAGATCTAATAGGAATGAAAACA | 2195 | AATGTTTTCATTCCTATTAGATC | 314 |
| | 6-210 | TT | | TG | 7 |
| 25 | H45_18 | AGATCTAATAGGAATGAAAACAT | 2196 | AAATGTTTTCATTCCTATTAGAT | 314 |
| | 7-211 | TT | | CT | 8 |
| 25 | H45_18 | GATCTAATAGGAATGAAAACATT | 2197 | AAAATGTTTTCATTCCTATTAGA | 314 |
| | 8-212 | TT | | TC | 9 |
| 25 | H45_18 | ATCTAATAGGAATGAAAACATTT | 2198 | TAAAATGTTTTCATTCCTATTAG | 315 |
| | 9-213 | TA | | AT | 0 |
| 25 | H45_19 | TCTAATAGGAATGAAAACATTTT | 2199 | CTAAAATGTTTTCATTCCTATTA | 315 |
| | 0-214 | AG | | GA | 1 |
| 25 | H45_19 | CTAATAGGAATGAAAACATTTTA | 2200 | GCTAAAATGTTTTCATTCCTATT | 315 |
| | 1-215 | GC | | AG | 2 |
| 25 | H45_19 | TAATAGGAATGAAAACATTTTAG | 2201 | TGCTAAAATGTTTTCATTCCTAT | 315 |
| | 2-216 | CA | | TA | 3 |
| 25 | H45_19 | AATAGGAATGAAAACATTTTAGC | 2202 | CTGCTAAAATGTTTTCATTCCTA | 315 |
| | 3-217 | AG | | TT | 4 |
| 25 | H45_19 | ATAGGAATGAAAACATTTTAGCA | 2203 | TCTGCTAAAATGTTTTCATTCCT | 315 |
| | 4-218 | GA | | AT | 5 |
| 25 | H45_19 | TAGGAATGAAAACATTTTAGCAG | 2204 | GTCTGCTAAAATGTTTTCATTCC | 315 |
| | 5-219 | AC | | TA | 6 |
| 25 | H45_19 | AGGAATGAAAACATTTTAGCAGA | 2205 | AGTCTGCTAAAATGTTTTCATTC | 315 |
| | 6-220 | CT | | CT | 7 |
| 25 | H45_19 | GGAATGAAAACATTTTAGCAGAC | 2206 | AAGTCTGCTAAAATGTTTTCATT | 315 |
| | 7-221 | TT | | CC | 8 |
| 25 | H45_19 | GAATGAAAACATTTTAGCAGACT | 2207 | AAAGTCTGCTAAAATGTTTTCAT | 315 |
| | 8-222 | TT | | TC | 9 |
| 25 | H45_19 | AATGAAAACATTTTAGCAGACTT | 2208 | AAAAGTCTGCTAAAATGTTTTCA | 316 |
| | 9-223 | TT | | TT | 0 |
| 25 | H45_20 | ATGAAAACATTTTAGCAGACTTT | 2209 | AAAAAGTCTGCTAAAATGTTTTC | 316 |
| | 0-224 | TT | | AT | 1 |
| 25 | H45_20 | TGAAAACATTTTAGCAGACTTTT | 2210 | TAAAAAGTCTGCTAAAATGTTTT | 316 |
| | 1-225 | TA | | CA | 2 |
| 25 | H45_20 | GAAAACATTTTAGCAGACTTTTT | 2211 | TTAAAAAGTCTGCTAAAATGTTT | 316 |
| | 2-226 | AA | | TC | 3 |
| 25 | H45_20 | AAAACATTTTAGCAGACTTTTTA | 2212 | CTTAAAAAGTCTGCTAAAATGTT | 316 |
| | 3-227 | AG | | TT | 4 |
| 25 | H45_20 | AAACATTTTAGCAGACTTTTTAA | 2213 | GCTTAAAAAGTCTGCTAAAATGT | 316 |
| | 4-228 | GC | | TT | 5 |
| 25 | H45_20 | AACATTTTAGCAGACTTTTTAAG | 2214 | AGCTTAAAAAGTCTGCTAAAATG | 316 |
| | 5-229 | CT | | TT | 6 |
| 25 | H45_20 | ACATTTTAGCAGACTTTTTAAGC | 2215 | AAGCTTAAAAAGTCTGCTAAAAT | 316 |
| | 6-230 | TT | | GT | 7 |
| 25 | H45_20 | CATTTTAGCAGACTTTTTAAGCT | 2216 | AAAGCTTAAAAAGTCTGCTAAAA | 316 |
| | 7-231 | TT | | TG | 8 |
| 25 | H45_20 | ATTTTAGCAGACTTTTTAAGCTT | 2217 | GAAAGCTTAAAAAGTCTGCTAAA | 316 |
| | 8-232 | TC | | AT | 9 |
| 25 | H45_20 | TTTTAGCAGACTTTTTAAGCTTT | 2218 | AGAAAGCTTAAAAAGTCTGCTAA | 317 |
| | 9-233 | CT | | AA | 0 |
| 25 | H45_21 | TTTAGCAGACTTTTTAAGCTTTC | 2219 | AAGAAAGCTTAAAAAGTCTGCTA | 317 |
| | 0-234 | TT | | AA | 1 |
| 25 | H45_21 | TTAGCAGACTTTTTAAGCTTTCT | 2220 | AAAGAAAGCTTAAAAAGTCTGCT | 317 |
| | 1-235 | TT | | AA | 2 |
| 25 | H45_21 | TAGCAGACTTTTTAAGCTTTCTT | 2221 | TAAAGAAAGCTTAAAAAGTCTGC | 317 |
| | 2-236 | TA | | TA | 3 |
| 25 | H45_21 | AGCAGACTTTTTAAGCTTTCTTT | 2222 | CTAAAGAAAGCTTAAAAAGTCTG | 317 |
| | 3-237 | AG | | CT | 4 |
| 25 | H45_21 | GCAGACTTTTTAAGCTTTCTTTA | 2223 | TCTAAAGAAAGCTTAAAAAGTCT | 317 |
| | 4-238 | GA | | GC | 5 |
| 25 | H45_21 | CAGACTTTTTAAGCTTTCTTTAG | 2224 | TTCTAAAGAAAGCTTAAAAAGTC | 317 |
| | 5-239 | AA | | TG | 6 |
| 25 | H45_21 | AGACTTTTTAAGCTTTCTTTAGA | 2225 | CTTCTAAAGAAAGCTTAAAAAGT | 317 |
| | 6-240 | AG | | CT | 7 |
| 25 | H45_21 | GACTTTTTAAGCTTTCTTTAGAA | 2226 | TCTTCTAAAGAAAGCTTAAAAAG | 317 |
| | 7-241 | GA | | TC | 8 |
| 25 | H45_21 | ACTTTTTAAGCTTTCTTTAGAAG | 2227 | TTCTTCTAAAGAAAGCTTAAAAA | 317 |
| | 8-242 | AA | | GT | 9 |
| 25 | H45_21 | CTTTTTAAGCTTTCTTTAGAAGA | 2228 | ATTCTTCTAAAGAAAGCTTAAAA | 318 |
| | 9-243 | AT | | AG | 0 |
| 25 | H45_22 | TTTTTAAGCTTTCTTTAGAAGAA | 2229 | TATTCTTCTAAAGAAAGCTTAAA | 318 |
| | 0-244 | TA | | AA | 1 |
| 26 | H45_15 | TGTCAGACAGAAAAAAGAGGTAG | 2230 | GCCCTACCTCTTTTTTCTGTCTG | 318 |
| | 8-183 | GGC | | ACA | 2 |
| 26 | H45_15 | GTCAGACAGAAAAAAGAGGTAGG | 2231 | CGCCCTACCTCTTTTTTCTGTCT | 318 |
| | 9-184 | GCG | | GAC | 3 |
| 26 | H45_16 | TCAGACAGAAAAAAGAGGTAGGG | 2232 | TCGCCCTACCTCTTTTTTCTGTC | 318 |
| | 0-185 | CGA | | TGA | 4 |
| 26 | H45_16 | CAGACAGAAAAAAGAGGTAGGGC | 2233 | GTCGCCCTACCTCTTTTTTCTGT | 318 |
| | 1-186 | GAC | | CTG | 5 |
| 26 | H45_16 | AGACAGAAAAAAGAGGTAGGGCG | 2234 | TGTCGCCCTACCTCTTTTTTCTG | 318 |
| | 2-187 | ACA | | TCT | 6 |
| 26 | H45_16 | GACAGAAAAAAGAGGTAGGGCGA | 2235 | CTGTCGCCCTACCTCTTTTTTCT | 318 |
| | 3-188 | CAG | | GTC | 7 |
| 26 | H45_16 | ACAGAAAAAAGAGGTAGGGCGAC | 2236 | TCTGTCGCCCTACCTCTTTTTTC | 318 |
| | 4-189 | AGA | | TGT | 8 |
| 26 | H45_16 | CAGAAAAAAGAGGTAGGGCGACA | 2237 | ATCTGTCGCCCTACCTCTTTTTT | 318 |
| | 5-190 | GAT | | CTG | 9 |
| 26 | H45_16 | AGAAAAAAGAGGTAGGGCGACAG | 2238 | GATCTGTCGCCCTACCTCTTTTT | 319 |
| | 6-191 | ATC | | TCT | 0 |
| 26 | H45_16 | GAAAAAAGAGGTAGGGCGACAGA | 2239 | AGATCTGTCGCCCTACCTCTTTT | 319 |
| | 7-192 | TCT | | TTC | 1 |
| 26 | H45_16 | AAAAAAGAGGTAGGGCGACAGAT | 2240 | TAGATCTGTCGCCCTACCTCTTT | 319 |
| | 8-193 | CTA | | TTT | 2 |
| 26 | H45_16 | AAAAAGAGGTAGGGCGACAGATC | 2241 | TTAGATCTGTCGCCCTACCTCTT | 319 |
| | 9-194 | TAA | | TTT | 3 |
| 26 | H45_17 | AAAAGAGGTAGGGCGACAGATCT | 2242 | ATTAGATCTGTCGCCCTACCTCT | 319 |
| | 0-195 | AAT | | TTT | 4 |
| 26 | H45_17 | AAAGAGGTAGGGCGACAGATCTA | 2243 | TATTAGATCTGTCGCCCTACCTC | 319 |
| | 1-196 | ATA | | TTT | 5 |
| 26 | H45_17 | AAGAGGTAGGGCGACAGATCTAA | 2244 | CTATTAGATCTGTCGCCCTACCT | 319 |
| | 2-197 | TAG | | CTT | 6 |
| 26 | H45_17 | AGAGGTAGGGCGACAGATCTAAT | 2245 | CCTATTAGATCTGTCGCCCTACC | 319 |
| | 3-198 | AGG | | TCT | 7 |
| 26 | H45_17 | GAGGTAGGGCGACAGATCTAATA | 2246 | TCCTATTAGATCTGTCGCCCTAC | 319 |
| | 4-199 | GGA | | CTC | 8 |
| 26 | H45_17 | AGGTAGGGCGACAGATCTAATAG | 2247 | TTCCTATTAGATCTGTCGCCCTA | 319 |
| | 5-200 | GAA | | CCT | 9 |
| 26 | H45_17 | GGTAGGGCGACAGATCTAATAGG | 2248 | ATTCCTATTAGATCTGTCGCCCT | 320 |
| | 6-201 | AAT | | ACC | 0 |
| 26 | H45_17 | GTAGGGCGACAGATCTAATAGGA | 2249 | CATTCCTATTAGATCTGTCGCCC | 320 |
| | 7-202 | ATG | | TAC | 1 |
| 26 | H45_17 | TAGGGCGACAGATCTAATAGGAA | 2250 | TCATTCCTATTAGATCTGTCGCC | 320 |
| | 8-203 | TGA | | CTA | 2 |
| 26 | H45_17 | AGGGCGACAGATCTAATAGGAAT | 2251 | TTCATTCCTATTAGATCTGTCGC | 320 |
| | 9-204 | GAA | | CCT | 3 |
| 26 | H45_18 | GGGCGACAGATCTAATAGGAATG | 2252 | TTTCATTCCTATTAGATCTGTCG | 320 |
| | 0-205 | AAA | | CCC | 4 |
| 26 | H45_18 | GGCGACAGATCTAATAGGAATGA | 2253 | TTTTCATTCCTATTAGATCTGTC | 320 |
| | 1-206 | AAA | | GCC | 5 |
| 26 | H45_18 | GCGACAGATCTAATAGGAATGAA | 2254 | GTTTTCATTCCTATTAGATCTGT | 320 |
| | 2-207 | AAC | | CGC | 6 |
| 26 | H45_18 | CGACAGATCTAATAGGAATGAAA | 2255 | TGTTTTCATTCCTATTAGATCTG | 320 |
| | 3-208 | ACA | | TCG | 7 |
| 26 | H45_18 | GACAGATCTAATAGGAATGAAAA | 2256 | ATGTTTTCATTCCTATTAGATCT | 320 |
| | 4-209 | CAT | | GTC | 8 |
| 26 | H45_18 | ACAGATCTAATAGGAATGAAAAC | 2257 | AATGTTTTCATTCCTATTAGATC | 320 |
| | 5-210 | ATT | | TGT | 9 |
| 26 | H45_18 | CAGATCTAATAGGAATGAAAACA | 2258 | AAATGTTTTCATTCCTATTAGAT | 321 |
| | 6-211 | TTT | | CTG | 0 |
| 26 | H45_18 | AGATCTAATAGGAATGAAAACAT | 2259 | AAAATGTTTTCATTCCTATTAGA | 321 |
| | 7-212 | TTT | | TCT | 1 |
| 26 | H45_18 | GATCTAATAGGAATGAAAACATT | 2260 | TAAAATGTTTTCATTCCTATTAG | 321 |
| | 8-213 | TTA | | ATC | 2 |
| 26 | H45_18 | ATCTAATAGGAATGAAAACATTT | 2261 | CTAAAATGTTTTCATTCCTATTA | 321 |
| | 9-214 | TAG | | GAT | 3 |
| 26 | H45_19 | TCTAATAGGAATGAAAACATTTT | 2262 | GCTAAAATGTTTTCATTCCTATT | 321 |
| | 0-215 | AGC | | AGA | 4 |
| 26 | H45_19 | CTAATAGGAATGAAAACATTTTA | 2263 | TGCTAAAATGTTTTCATTCCTAT | 321 |
| | 1-216 | GCA | | TAG | 5 |
| 26 | H45_19 | TAATAGGAATGAAAACATTTTAG | 2264 | CTGCTAAAATGTTTTCATTCCTA | 321 |
| | 2-217 | CAG | | TTA | 6 |
| 26 | H45_19 | AATAGGAATGAAAACATTTTAGC | 2265 | TCTGCTAAAATGTTTTCATTCCT | 321 |
| | 3-218 | AGA | | ATT | 7 |
| 26 | H45_19 | ATAGGAATGAAAACATTTTAGCA | 2266 | GTCTGCTAAAATGTTTTCATTCC | 321 |
| | 4-219 | GAC | | TAT | 8 |
| 26 | H45_19 | TAGGAATGAAAACATTTTAGCAG | 2267 | AGTCTGCTAAAATGTTTTCATTC | 321 |
| | 5-220 | ACT | | CTA | 9 |
| 26 | H45_19 | AGGAATGAAAACATTTTAGCAGA | 2268 | AAGTCTGCTAAAATGTTTTCATT | 322 |
| | 6-221 | CTT | | CCT | 0 |
| 26 | H45_19 | GGAATGAAAACATTTTAGCAGAC | 2269 | AAAGTCTGCTAAAATGTTTTCAT | 322 |
| | 7-222 | TTT | | TCC | 1 |
| 26 | H45_19 | GAATGAAAACATTTTAGCAGACT | 2270 | AAAAGTCTGCTAAAATGTTTTCA | 322 |
| | 8-223 | TTT | | TTC | 2 |
| 26 | H45_19 | AATGAAAACATTTTAGCAGACTT | 2271 | AAAAAGTCTGCTAAAATGTTTTC | 322 |
| | 9-224 | TTT | | ATT | 3 |
| 26 | H45_20 | ATGAAAACATTTTAGCAGACTTT | 2272 | TAAAAAGTCTGCTAAAATGTTTT | 322 |
| | 0-225 | TTA | | CAT | 4 |
| 26 | H45_20 | TGAAAACATTTTAGCAGACTTTT | 2273 | TTAAAAAGTCTGCTAAAATGTTT | 322 |
| | 1-226 | TAA | | TCA | 5 |
| 26 | H45_20 | GAAAACATTTTAGCAGACTTTTT | 2274 | CTTAAAAAGTCTGCTAAAATGTT | 322 |
| | 2-227 | AAG | | TTC | 6 |
| 26 | H45_20 | AAAACATTTTAGCAGACTTTTTA | 2275 | GCTTAAAAAGTCTGCTAAAATGT | 322 |
| | 3-228 | AGC | | TTT | 7 |
| 26 | H45_20 | AAACATTTTAGCAGACTTTTTAA | 2276 | AGCTTAAAAAGTCTGCTAAAATG | 322 |
| | 4-229 | GCT | | TTT | 8 |
| 26 | H45_20 | AACATTTTAGCAGACTTTTTAAG | 2277 | AAGCTTAAAAAGTCTGCTAAAAT | 322 |
| | 5-230 | CTT | | GTT | 9 |
| 26 | H45_20 | ACATTTTAGCAGACTTTTTAAGC | 2278 | AAAGCTTAAAAAGTCTGCTAAAA | 323 |
| | 6-231 | TTT | | TGT | 0 |
| 26 | H45_20 | CATTTTAGCAGACTTTTTAAGCT | 2279 | GAAAGCTTAAAAAGTCTGCTAAA | 323 |
| | 7-232 | TTC | | ATG | 1 |
| 26 | H45_20 | ATTTTAGCAGACTTTTTAAGCTT | 2280 | AGAAAGCTTAAAAAGTCTGCTAA | 323 |
| | 8-233 | TCT | | AAT | 2 |
| 26 | H45_20 | TTTTAGCAGACTTTTTAAGCTTT | 2281 | AAGAAAGCTTAAAAAGTCTGCTA | 323 |
| | 9-234 | CTT | | AAA | 3 |
| 26 | H45_21 | TTTAGCAGACTTTTTAAGCTTTC | 2282 | AAAGAAAGCTTAAAAAGTCTGCT | 323 |
| | 0-235 | TTT | | AAA | 4 |
| 26 | H45_21 | TTAGCAGACTTTTTAAGCTTTCT | 2283 | TAAAGAAAGCTTAAAAAGTCTGC | 323 |
| | 1-236 | TTA | | TAA | 5 |
| 26 | H45_21 | TAGCAGACTTTTTAAGCTTTCTT | 2284 | CTAAAGAAAGCTTAAAAAGTCTG | 323 |
| | 2-237 | TAG | | CTA | 6 |
| 26 | H45_21 | AGCAGACTTTTTAAGCTTTCTTT | 2285 | TCTAAAGAAAGCTTAAAAAGTCT | 323 |
| | 3-238 | AGA | | GCT | 7 |
| 26 | H45_21 | GCAGACTTTTTAAGCTTTCTTTA | 2286 | TTCTAAAGAAAGCTTAAAAAGTC | 323 |
| | 4-239 | GAA | | TGC | 8 |
| 26 | H45_21 | CAGACTTTTTAAGCTTTCTTTAG | 2287 | CTTCTAAAGAAAGCTTAAAAAGT | 323 |
| | 5-240 | AAG | | CTG | 9 |
| 26 | H45_21 | AGACTTTTTAAGCTTTCTTTAGA | 2288 | TCTTCTAAAGAAAGCTTAAAAAG | 324 |
| | 6-241 | AGA | | TCT | 0 |
| 26 | H45_21 | GACTTTTTAAGCTTTCTTTAGAA | 2289 | TTCTTCTAAAGAAAGCTTAAAAA | 324 |
| | 7-242 | GAA | | GTC | 1 |
| 26 | H45_21 | ACTTTTTAAGCTTTCTTTAGAAG | 2290 | ATTCTTCTAAAGAAAGCTTAAAA | 324 |
| | 8-243 | AAT | | AGT | 2 |
| 26 | H45_21 | CTTTTTAAGCTTTCTTTAGAAGA | 2291 | TATTCTTCTAAAGAAAGCTTAAA | 324 |
| | 9-244 | ATA | | AAG | 3 |
| 26 | H45_22 | TTTTTAAGCTTTCTTTAGAAGAA | 2292 | ATATTCTTCTAAAGAAAGCTTAA | 324 |
| | 0-245 | TAT | | AAA | 4 |
| 27 | H45_15 | CTGTCAGACAGAAAAAAGAGGTA | 2293 | GCCCTACCTCTTTTTTCTGTCTG | 324 |
| | 7-183 | GGGC | | ACAG | 5 |
| 27 | H45_15 | TGTCAGACAGAAAAAAGAGGTAG | 2294 | CGCCCTACCTCTTTTTTCTGTCT | 324 |
| | 8-184 | GGCG | | GACA | 6 |
| 27 | H45_15 | GTCAGACAGAAAAAAGAGGTAGG | 2295 | TCGCCCTACCTCTTTTTTCTGTC | 324 |
| | 9-185 | GCGA | | TGAC | 7 |
| 27 | H45_16 | TCAGACAGAAAAAAGAGGTAGGG | 2296 | GTCGCCCTACCTCTTTTTTCTGT | 324 |
| | 0-186 | CGAC | | CTGA | 8 |
| 27 | H45_16 | CAGACAGAAAAAAGAGGTAGGGC | 2297 | TGTCGCCCTACCTCTTTTTTCTG | 324 |
| | 1-187 | GACA | | TCTG | 9 |
| 27 | H45_16 | AGACAGAAAAAAGAGGTAGGGCG | 2298 | CTGTCGCCCTACCTCTTTTTTCT | 325 |
| | 2-188 | ACAG | | GTCT | 0 |
| 27 | H45_16 | GACAGAAAAAAGAGGTAGGGCGA | 2299 | TCTGTCGCCCTACCTCTTTTTTC | 325 |
| | 3-189 | CAGA | | TGTC | 1 |
| 27 | H45_16 | ACAGAAAAAAGAGGTAGGGCGAC | 2300 | ATCTGTCGCCCTACCTCTTTTTT | 325 |
| | 4-190 | AGAT | | CTGT | 2 |
| 27 | H45_16 | CAGAAAAAAGAGGTAGGGCGACA | 2301 | GATCTGTCGCCCTACCTCTTTTT | 325 |
| | 5-191 | GATC | | TCTG | 3 |
| 27 | H45_16 | AGAAAAAAGAGGTAGGGCGACAG | 2302 | AGATCTGTCGCCCTACCTCTTTT | 325 |
| | 6-192 | ATCT | | TTCT | 4 |
| 27 | H45_16 | GAAAAAAGAGGTAGGGCGACAGA | 2303 | TAGATCTGTCGCCCTACCTCTTT | 325 |
| | 7-193 | TCTA | | TTTC | 5 |
| 27 | H45_16 | AAAAAAGAGGTAGGGCGACAGAT | 2304 | TTAGATCTGTCGCCCTACCTCTT | 325 |
| | 8-194 | CTAA | | TTTT | 6 |
| 27 | H45_16 | AAAAAGAGGTAGGGCGACAGATC | 2305 | ATTAGATCTGTCGCCCTACCTCT | 325 |
| | 9-195 | TAAT | | TTTT | 7 |
| 27 | H45_17 | AAAAGAGGTAGGGCGACAGATCT | 2306 | TATTAGATCTGTCGCCCTACCTC | 325 |
| | 0-196 | AATA | | TTTT | 8 |
| 27 | H45_17 | AAAGAGGTAGGGCGACAGATCTA | 2307 | CTATTAGATCTGTCGCCCTACCT | 325 |
| | 1-197 | ATAG | | CTTT | 9 |
| 27 | H45_17 | AAGAGGTAGGGCGACAGATCTAA | 2308 | CCTATTAGATCTGTCGCCCTACC | 326 |
| | 2-198 | TAGG | | TCTT | 0 |
| 27 | H45_17 | AGAGGTAGGGCGACAGATCTAAT | 2309 | TCCTATTAGATCTGTCGCCCTAC | 326 |
| | 3-199 | AGGA | | CTCT | 1 |
| 27 | H45_17 | GAGGTAGGGCGACAGATCTAATA | 2310 | TTCCTATTAGATCTGTCGCCCTA | 326 |
| | 4-200 | GGAA | | CCTC | 2 |
| 27 | H45_17 | AGGTAGGGCGACAGATCTAATAG | 2311 | ATTCCTATTAGATCTGTCGCCCT | 326 |
| | 5-201 | GAAT | | ACCT | 3 |
| 27 | H45_17 | GGTAGGGCGACAGATCTAATAGG | 2312 | CATTCCTATTAGATCTGTCGCCC | 326 |
| | 6-202 | AATG | | TACC | 4 |
| 27 | H45_17 | GTAGGGCGACAGATCTAATAGGA | 2313 | TCATTCCTATTAGATCTGTCGCC | 326 |
| | 7-203 | ATGA | | CTAC | 5 |
| 27 | H45_17 | TAGGGCGACAGATCTAATAGGAA | 2314 | TTCATTCCTATTAGATCTGTCGC | 326 |
| | 8-204 | TGAA | | CCTA | 6 |
| 27 | H45_17 | AGGGCGACAGATCTAATAGGAAT | 2315 | TTTCATTCCTATTAGATCTGTCG | 326 |
| | 9-205 | GAAA | | CCCT | 7 |
| 27 | H45_18 | GGGCGACAGATCTAATAGGAATG | 2316 | TTTTCATTCCTATTAGATCTGTC | 326 |
| | 0-206 | AAAA | | GCCC | 8 |
| 27 | H45_18 | GGCGACAGATCTAATAGGAATGA | 2317 | GTTTTCATTCCTATTAGATCTGT | 326 |
| | 1-207 | AAAC | | CGCC | 9 |
| 27 | H45_18 | GCGACAGATCTAATAGGAATGAA | 2318 | TGTTTTCATTCCTATTAGATCTG | 327 |
| | 2-208 | AACA | | TCGC | 0 |
| 27 | H45_18 | CGACAGATCTAATAGGAATGAAA | 2319 | ATGTTTTCATTCCTATTAGATCT | 327 |
| | 3-209 | ACAT | | GTCG | 1 |
| 27 | H45_18 | GACAGATCTAATAGGAATGAAAA | 2320 | AATGTTTTCATTCCTATTAGATC | 327 |
| | 4-210 | CATT | | TGTC | 2 |
| 27 | H45_18 | ACAGATCTAATAGGAATGAAAAC | 2321 | AAATGTTTTCATTCCTATTAGAT | 327 |
| | 5-211 | ATTT | | CTGT | 3 |
| 27 | H45_18 | CAGATCTAATAGGAATGAAAACA | 2322 | AAAATGTTTTCATTCCTATTAGA | 327 |
| | 6-212 | TTTT | | TCTG | 4 |
| 27 | H45_18 | AGATCTAATAGGAATGAAAACAT | 2323 | TAAAATGTTTTCATTCCTATTAG | 327 |
| | 7-213 | TTTA | | ATCT | 5 |
| 27 | H45_18 | GATCTAATAGGAATGAAAACATT | 2324 | CTAAAATGTTTTCATTCCTATTA | 327 |
| | 8-214 | TTAG | | GATO | 6 |
| 27 | H45_18 | ATCTAATAGGAATGAAAACATTT | 2325 | GCTAAAATGTTTTCATTCCTATT | 327 |
| | 9-215 | TAGC | | AGAT | 7 |
| 27 | H45_19 | TCTAATAGGAATGAAAACATTTT | 2326 | TGCTAAAATGTTTTCATTCCTAT | 327 |
| | 0-216 | AGCA | | TAGA | 8 |
| 27 | H45_19 | CTAATAGGAATGAAAACATTTTA | 2327 | CTGCTAAAATGTTTTCATTCCTA | 327 |
| | 1-217 | GCAG | | TTAG | 9 |
| 27 | H45_19 | TAATAGGAATGAAAACATTTTAG | 2328 | TCTGCTAAAATGTTTTCATTCCT | 328 |
| | 2-218 | CAGA | | ATTA | 0 |
| 27 | H45_19 | AATAGGAATGAAAACATTTTAGC | 2329 | GTCTGCTAAAATGTTTTCATTCC | 328 |
| | 3-219 | AGAC | | TATT | 1 |
| 27 | H45_19 | ATAGGAATGAAAACATTTTAGCA | 2330 | AGTCTGCTAAAATGTTTTCATTC | 328 |
| | 4-220 | GACT | | CTAT | 2 |
| 27 | H45_19 | TAGGAATGAAAACATTTTAGCAG | 2331 | AAGTCTGCTAAAATGTTTTCATT | 328 |
| | 5-221 | ACTT | | CCTA | 3 |
| 27 | H45_19 | AGGAATGAAAACATTTTAGCAGA | 2332 | AAAGTCTGCTAAAATGTTTTCAT | 328 |
| | 6-222 | CTTT | | TCCT | 4 |
| 27 | H45_19 | GGAATGAAAACATTTTAGCAGAC | 2333 | AAAAGTCTGCTAAAATGTTTTCA | 328 |
| | 7-223 | TTTT | | TTCC | 5 |
| 27 | H45_19 | GAATGAAAACATTTTAGCAGACT | 2334 | AAAAAGTCTGCTAAAATGTTTTC | 328 |
| | 8-224 | TTTT | | ATTC | 6 |
| 27 | H45_19 | AATGAAAACATTTTAGCAGACTT | 2335 | TAAAAAGTCTGCTAAAATGTTTT | 328 |
| | 9-225 | TTTA | | CATT | 7 |
| 27 | H45_20 | ATGAAAACATTTTAGCAGACTTT | 2336 | TTAAAAAGTCTGCTAAAATGTTT | 328 |
| | 0-226 | TTAA | | TCAT | 8 |
| 27 | H45_20 | TGAAAACATTTTAGCAGACTTTT | 2337 | CTTAAAAAGTCTGCTAAAATGTT | 328 |
| | 1-227 | TAAG | | TTCA | 9 |
| 27 | H45_20 | GAAAACATTTTAGCAGACTTTTT | 2338 | GCTTAAAAAGTCTGCTAAAATGT | 329 |
| | 2-228 | AAGC | | TTTC | 0 |
| 27 | H45_20 | AAAACATTTTAGCAGACTTTTTA | 2339 | AGCTTAAAAAGTCTGCTAAAATG | 329 |
| | 3-229 | AGCT | | TTTT | 1 |
| 27 | H45_20 | AAACATTTTAGCAGACTTTTTAA | 2340 | AAGCTTAAAAAGTCTGCTAAAAT | 329 |
| | 4-230 | GCTT | | GTTT | 2 |
| 27 | H45_20 | AACATTTTAGCAGACTTTTTAAG | 2341 | AAAGCTTAAAAAGTCTGCTAAAA | 329 |
| | 5-231 | CTTT | | TGTT | 3 |
| 27 | H45_20 | ACATTTTAGCAGACTTTTTAAGC | 2342 | GAAAGCTTAAAAAGTCTGCTAAA | 329 |
| | 6-232 | TTTC | | ATGT | 4 |
| 27 | H45_20 | CATTTTAGCAGACTTTTTAAGCT | 2343 | AGAAAGCTTAAAAAGTCTGCTAA | 329 |
| | 7-233 | TTCT | | AATG | 5 |
| 27 | H45_20 | ATTTTAGCAGACTTTTTAAGCTT | 2344 | AAGAAAGCTTAAAAAGTCTGCTA | 329 |
| | 8-234 | TCTT | | AAAT | 6 |
| 27 | H45_20 | TTTTAGCAGACTTTTTAAGCTTT | 2345 | AAAGAAAGCTTAAAAAGTCTGCT | 329 |
| | 9-235 | CTTT | | AAAA | 7 |
| 27 | H45_21 | TTTAGCAGACTTTTTAAGCTTTC | 2346 | TAAAGAAAGCTTAAAAAGTCTGC | 329 |
| | 0-236 | TTTA | | TAAA | 8 |
| 27 | H45_21 | TTAGCAGACTTTTTAAGCTTTCT | 2347 | CTAAAGAAAGCTTAAAAAGTCTG | 329 |
| | 1-237 | TTAG | | CTAA | 9 |
| 27 | H45_21 | TAGCAGACTTTTTAAGCTTTCTT | 2348 | TCTAAAGAAAGCTTAAAAAGTCT | 330 |
| | 2-238 | TAGA | | GCTA | 0 |
| 27 | H45_21 | AGCAGACTTTTTAAGCTTTCTTT | 2349 | TTCTAAAGAAAGCTTAAAAAGTC | 330 |
| | 3-239 | AGAA | | TGCT | 1 |
| 27 | H45_21 | GCAGACTTTTTAAGCTTTCTTTA | 2350 | CTTCTAAAGAAAGCTTAAAAAGT | 330 |
| | 4-240 | GAAG | | CTGC | 2 |
| 27 | H45_21 | CAGACTTTTTAAGCTTTCTTTAG | 2351 | TCTTCTAAAGAAAGCTTAAAAAG | 330 |
| | 5-241 | AAGA | | TCTG | 3 |
| 27 | H45_21 | AGACTTTTTAAGCTTTCTTTAGA | 2352 | TTCTTCTAAAGAAAGCTTAAAAA | 330 |
| | 6-242 | AGAA | | GTCT | 4 |
| 27 | H45_21 | GACTTTTTAAGCTTTCTTTAGAA | 2353 | ATTCTTCTAAAGAAAGCTTAAAA | 330 |
| | 7-243 | GAAT | | AGTC | 5 |
| 27 | H45_21 | ACTTTTTAAGCTTTCTTTAGAAG | 2354 | TATTCTTCTAAAGAAAGCTTAAA | 330 |
| | 8-244 | AATA | | AAGT | 6 |
| 27 | H45_21 | CTTTTTAAGCTTTCTTTAGAAGA | 2355 | ATATTCTTCTAAAGAAAGCTTAA | 330 |
| | 9-245 | ATAT | | AAAG | 7 |
| 27 | H45_22 | TTTTTAAGCTTTCTTTAGAAGAA | 2356 | AATATTCTTCTAAAGAAAGCTTA | 330 |
| | 0-246 | TATT | | AAAA | 8 |
| 28 | H45_15 | GCTGTCAGACAGAAAAAAGAGGT | 2357 | GCCCTACCTCTTTTTTCTGTCTG | 330 |
| | 6-183 | AGGGC | | ACAGC | 9 |
| 28 | H45_15 | CTGTCAGACAGAAAAAAGAGGTA | 2358 | CGCCCTACCTCTTTTTTCTGTCT | 331 |
| | 7-184 | GGGCG | | GACAG | 0 |
| 28 | H45_15 | TGTCAGACAGAAAAAAGAGGTAG | 2359 | TCGCCCTACCTCTTTTTTCTGTC | 331 |
| | 8-185 | GGCGA | | TGACA | 1 |
| 28 | H15_15 | GTCAGACAGAAAAAAGAGGTAGG | 2360 | GTCGCCCTACCTCTTTTTTCTGT | 331 |
| | 9-186 | GCGAC | | CTGAC | 2 |
| 28 | H45_16 | TCAGACAGAAAAAAGAGGTAGGG | 2361 | TGTCGCCCTACCTCTTTTTTCTG | 331 |
| | 0-187 | CGACA | | TCTGA | 3 |
| 28 | H45_16 | CAGACAGAAAAAAGAGGTAGGGC | 2362 | CTGTCGCCCTACCTCTTTTTTCT | 331 |
| | 1-188 | GACAG | | GTCTG | 4 |
| 28 | H45_16 | AGACAGAAAAAAGAGGTAGGGCG | 2363 | TCTGTCGCCCTACCTCTTTTTTC | 331 |
| | 2-189 | ACAGA | | TGTCT | 5 |
| 28 | H45_16 | GACAGAAAAAAGAGGTAGGGCGA | 2364 | ATCTGTCGCCCTACCTCTTTTTT | 331 |
| | 3-190 | CAGAT | | CTGTC | 6 |
| 28 | H45_16 | ACAGAAAAAAGAGGTAGGGCGAC | 2365 | GATCTGTCGCCCTACCTCTTTTT | 331 |
| | 4-191 | AGATC | | TCTGT | 7 |
| 28 | H45_16 | CAGAAAAAAGAGGTAGGGCGACA | 2366 | AGATCTGTCGCCCTACCTCTTTT | 331 |
| | 5-192 | GATCT | | TTCTG | 8 |
| 28 | H45_16 | AGAAAAAAGAGGTAGGGCGACAG | 2367 | TAGATCTGTCGCCCTACCTCTTT | 331 |
| | 6-193 | ATCTA | | TTTCT | 9 |
| 28 | H45_16 | GAAAAAAGAGGTAGGGCGACAGA | 2368 | TTAGATCTGTCGCCCTACCTCTT | 332 |
| | 7-194 | TCTAA | | TTTTC | 0 |
| 28 | H45_16 | AAAAAAGAGGTAGGGCGACAGAT | 2369 | ATTAGATCTGTCGCCCTACCTCT | 332 |
| | 8-195 | CTAAT | | TTTTT | 1 |
| 28 | H45_16 | AAAAAGAGGTAGGGCGACAGATC | 2370 | TATTAGATCTGTCGCCCTACCTC | 332 |
| | 9-196 | TAATA | | TTTTT | 2 |
| 28 | H45_17 | AAAAGAGGTAGGGCGACAGATCT | 2371 | CTATTAGATCTGTCGCCCTACCT | 332 |
| | 0-197 | AATAG | | CTTTT | 3 |
| 28 | H45_17 | AAAGAGGTAGGGCGACAGATCTA | 2372 | CCTATTAGATCTGTCGCCCTACC | 332 |
| | 1-198 | ATAGG | | TCTTT | 4 |
| 28 | H45_17 | AAGAGGTAGGGCGACAGATCTAA | 2373 | TCCTATTAGATCTGTCGCCCTAC | 332 |
| | 2-199 | TAGGA | | CTCTT | 5 |
| 28 | H45_17 | AGAGGTAGGGCGACAGATCTAAT | 2374 | TTCCTATTAGATCTGTCGCCCTA | 332 |
| | 3-200 | AGGAA | | CCTCT | 6 |
| 28 | H45_17 | GAGGTAGGGCGACAGATCTAATA | 2375 | ATTCCTATTAGATCTGTCGCCCT | 332 |
| | 4-201 | GGAAT | | ACCTC | 7 |
| 28 | H45_17 | AGGTAGGGCGACAGATCTAATAG | 2376 | CATTCCTATTAGATCTGTCGCCC | 332 |
| | 5-202 | GAATG | | TACCT | 8 |
| 28 | H45_17 | GGTAGGGCGACAGATCTAATAGG | 2377 | TCATTCCTATTAGATCTGTCGCC | 332 |
| | 6-203 | AATGA | | CTACC | 9 |
| 28 | H45_17 | GTAGGGCGACAGATCTAATAGGA | 2378 | TTCATTCCTATTAGATCTGTCGC | 333 |
| | 7-204 | ATGAA | | CCTAC | 0 |
| 28 | H45_17 | TAGGGCGACAGATCTAATAGGAA | 2379 | TTTCATTCCTATTAGATCTGTCG | 333 |
| | 8-205 | TGAAA | | CCCTA | 1 |
| 28 | H45_17 | AGGGCGACAGATCTAATAGGAAT | 2380 | TTTTCATTCCTATTAGATCTGTC | 333 |
| | 9-206 | GAAAA | | GCCCT | 2 |
| 28 | H45_18 | GGGCGACAGATCTAATAGGAATG | 2381 | GTTTTCATTCCTATTAGATCTGT | 333 |
| | 0-207 | AAAAC | | CGCCC | 3 |
| 28 | H45_18 | GGCGACAGATCTAATAGGAATGA | 2382 | TGTTTTCATTCCTATTAGATCTG | 333 |
| | 1-208 | AAACA | | TCGCC | 4 |
| 28 | H45_18 | GCGACAGATCTAATAGGAATGAA | 2383 | ATGTTTTCATTCCTATTAGATCT | 333 |
| | 2-209 | AACAT | | GTCGC | 5 |
| 28 | H45_18 | CGACAGATCTAATAGGAATGAAA | 2384 | AATGTTTTCATTCCTATTAGATC | 333 |
| | 3-210 | ACATT | | TGTCG | 6 |
| 28 | H45_18 | GACAGATCTAATAGGAATGAAAA | 2385 | AAATGTTTTCATTCCTATTAGAT | 333 |
| | 4-211 | CATTT | | CTGTC | 7 |
| 28 | H45_18 | ACAGATCTAATAGGAATGAAAAC | 2386 | AAAATGTTTTCATTCCTATTAGA | 333 |
| | 5-212 | ATTTT | | TCTGT | 8 |
| 28 | H45_18 | CAGATCTAATAGGAATGAAAACA | 2387 | TAAAATGTTTTCATTCCTATTAG | 333 |
| | 6-213 | TTTTA | | ATCTG | 9 |
| 28 | H45_18 | AGATCTAATAGGAATGAAAACAT | 2388 | CTAAAATGTTTTCATTCCTATTA | 334 |
| | 7-214 | TTTAG | | GATCT | 0 |
| 28 | H45_18 | GATCTAATAGGAATGAAAACATT | 2389 | GCTAAAATGTTTTCATTCCTATT | 334 |
| | 8-215 | TTAGC | | AGATC | 1 |
| 28 | H45_18 | ATCTAATAGGAATGAAAACATTT | 2390 | TGCTAAAATGTTTTCATTCCTAT | 334 |
| | 9-216 | TAGCA | | TAGAT | 2 |
| 28 | H45_19 | TCTAATAGGAATGAAAACATTTT | 2391 | CTGCTAAAATGTTTTCATTCCTA | 334 |
| | 0-217 | AGCAG | | TTAGA | 3 |
| 28 | H45_19 | CTAATAGGAATGAAAACATTTTA | 2392 | TCTGCTAAAATGTTTTCATTCCT | 334 |
| | 1-218 | GCAGA | | ATTAG | 4 |
| 28 | H45_19 | TAATAGGAATGAAAACATTTTAG | 2393 | GTCTGCTAAAATGTTTTCATTCC | 334 |
| | 2-219 | CAGAC | | TATTA | 5 |
| 28 | H45_19 | AATAGGAATGAAAACATTTTAGC | 2394 | AGTCTGCTAAAATGTTTTCATTC | 334 |
| | 3-220 | AGACT | | CTATT | 6 |
| 28 | h45_19 | ATAGGAATGAAAACATTTTAGCA | 2395 | AAGTCTGCTAAAATGTTTTCATT | 334 |
| | 4-221 | GACTT | | CCTAT | 7 |
| 28 | H45_19 | TAGGAATGAAAACATTTTAGCAG | 2396 | AAAGTCTGCTAAAATGTTTTCAT | 334 |
| | 5-222 | ACTTT | | TCCTA | 8 |
| 28 | H45_19 | AGGAATGAAAACATTTTAGCAGA | 2397 | AAAAGTCTGCTAAAATGTTTTCA | 334 |
| | 6-223 | CTTTT | | TTCCT | 9 |
| 28 | H45_19 | GGAATGAAAACATTTTAGCAGAC | 2398 | AAAAAGTCTGCTAAAATGTTTTC | 335 |
| | 7-224 | TTTTT | | ATTCC | 0 |
| 28 | H45_19 | GAATGAAAACATTTTAGCAGACT | 2399 | TAAAAAGTCTGCTAAAATGTTTT | 335 |
| | 8-225 | TTTTA | | CATTC | 1 |
| 28 | H45_19 | AATGAAAACATTTTAGCAGACTT | 2400 | TTAAAAAGTCTGCTAAAATGTTT | 335 |
| | 9-226 | TTTAA | | TCATT | 2 |
| 28 | H45_20 | ATGAAAACATTTTAGCAGACTTT | 2401 | CTTAAAAAGTCTGCTAAAATGTT | 335 |
| | 0-227 | TTAAG | | TTCAT | 3 |
| 28 | H45_20 | TGAAAACATTTTAGCAGACTTTT | 2402 | GCTTAAAAAGTCTGCTAAAATGT | 335 |
| | 1-228 | TAAGC | | TTTCA | 4 |
| 28 | H45_20 | GAAAACATTTTAGCAGACTTTTT | 2403 | AGCTTAAAAAGTCTGCTAAAATG | 335 |
| | 2-229 | AAGCT | | TTTTC | 5 |
| 28 | H45_20 | AAAACATTTTAGCAGACTTTTTA | 2404 | AAGCTTAAAAAGTCTGCTAAAAT | 335 |
| | 3-230 | AGCTT | | GTTTT | 6 |
| 28 | H45_20 | AAACATTTTAGCAGACTTTTTAA | 2405 | AAAGCTTAAAAAGTCTGCTAAAA | 335 |
| | 4-231 | GCTTT | | TGTTT | 7 |
| 28 | H45_20 | AACATTTTAGCAGACTTTTTAAG | 2406 | GAAAGCTTAAAAAGTCTGCTAAA | 335 |
| | 5-232 | CTTTC | | ATGTT | 8 |
| 28 | H45_20 | ACATTTTAGCAGACTTTTTAAGC | 2407 | AGAAAGCTTAAAAAGTCTGCTAA | 335 |
| | 6-233 | TTTCT | | AATGT | 9 |
| 28 | H45_20 | CATTTTAGCAGACTTTTTAAGCT | 2408 | AAGAAAGCTTAAAAAGTCTGCTA | 336 |
| | 7-234 | TTCTT | | AAATG | 0 |
| 28 | H45_20 | ATTTTAGCAGACTTTTTAAGCTT | 2409 | AAAGAAAGCTTAAAAAGTCTGCT | 336 |
| | 8-235 | TCTTT | | AAAAT | 1 |
| 28 | H45_20 | TTTTAGCAGACTTTTTAAGCTTT | 2410 | TAAAGAAAGCTTAAAAAGTCTGC | 336 |
| | 9-236 | CTTTA | | TAAAA | 2 |
| 28 | H45_21 | TTTAGCAGACTTTTTAAGCTTTC | 2411 | CTAAAGAAAGCTTAAAAAGTCTG | 336 |
| | 0-237 | TTTAG | | CTAAA | 3 |
| 28 | H45_21 | TTAGCAGACTTTTTAAGCTTTCT | 2412 | TCTAAAGAAAGCTTAAAAAGTCT | 336 |
| | 1-238 | TTAGA | | GCTAA | 4 |
| 28 | H45_21 | TAGCAGACTTTTTAAGCTTTCTT | 2413 | TTCTAAAGAAAGCTTAAAAAGTC | 336 |
| | 2-239 | TAGAA | | TGCTA | 5 |
| 28 | H45_21 | AGCAGACTTTTTAAGCTTTCTTT | 2414 | CTTCTAAAGAAAGCTTAAAAAGT | 336 |
| | 3-240 | AGAAG | | CTGCT | 6 |
| 28 | H45_21 | GCAGACTTTTTAAGCTTTCTTTA | 2415 | TCTTCTAAAGAAAGCTTAAAAAG | 336 |
| | 4-241 | GAAGA | | TCTGC | 7 |
| 28 | H45_21 | CAGACTTTTTAAGCTTTCTTTAG | 2416 | TTCTTCTAAAGAAAGCTTAAAAA | 336 |
| | 5-242 | AAGAA | | GTCTG | 8 |
| 28 | H45_21 | AGACTTTTTAAGCTTTCTTTAGA | 2417 | ATTCTTCTAAAGAAAGCTTAAAA | 336 |
| | 6-243 | AGAAT | | AGTCT | 9 |
| 28 | H45_21 | GACTTTTTAAGCTTTCTTTAGAA | 2418 | TATTCTTCTAAAGAAAGCTTAAA | 337 |
| | 7-244 | GAATA | | AAGTC | 0 |
| 28 | H45_21 | ACTTTTTAAGCTTTCTTTAGAAG | 2419 | ATATTCTTCTAAAGAAAGCTTAA | 337 |
| | 8-245 | AATAT | | AAAGT | 1 |
| 28 | H45_21 | CTTTTTAAGCTTTCTTTAGAAGA | 2420 | AATATTCTTCTAAAGAAAGCTTA | 337 |
| | 9-246 | ATATT | | AAAAG | 2 |
| 28 | H45_22 | TTTTTAAGCTTTCTTTAGAAGAA | 2421 | AAATATTCTTCTAAAGAAAGCTT | 337 |
| | 0-247 | TATTT | | AAAAA | 3 |
| 29 | H45_15 | AGCTGTCAGACAGAAAAAAGAGG | 2422 | GCCCTACCTCTTTTTTCTGTCTG | 337 |
| | 5-183 | TAGGGC | | ACAGCT | 4 |
| 29 | H45_15 | GCTGTCAGACAGAAAAAAGAGGT | 2423 | CGCCCTACCTCTTTTTTCTGTCT | 337 |
| | 6-184 | AGGGCG | | GACAGC | 5 |
| 29 | H45_15 | CTGTCAGACAGAAAAAAGAGGTA | 2424 | TCGCCCTACCTCTTTTTTCTGTC | 337 |
| | 7-185 | GGGCGA | | TGACAG | 6 |
| 29 | H45_15 | TGTCAGACAGAAAAAAGAGGTAG | 2425 | GTCGCCCTACCTCTTTTTTCTGT | 337 |
| | 8-186 | GGCGAC | | CTGACA | 7 |
| 29 | H45_15 | GTCAGACAGAAAAAAGAGGTAGG | 2426 | TGTCGCCCTACCTCTTTTTTCTG | 337 |
| | 9-187 | GCGACA | | TCTGAC | 8 |
| 29 | H45_16 | TCAGACAGAAAAAAGAGGTAGGG | 2427 | CTGTCGCCCTACCTCTTTTTTCT | 337 |
| | 0-188 | CGACAG | | GTCTGA | 9 |
| 29 | H45_16 | CAGACAGAAAAAAGAGGTAGGGC | 2428 | TCTGTCGCCCTACCTCTTTTTTC | 338 |
| | 1-189 | GACAGA | | TGTCTG | 0 |
| 29 | H45_16 | AGACAGAAAAAAGAGGTAGGGCG | 2429 | ATCTGTCGCCCTACCTCTTTTTT | 338 |
| | 2-190 | ACAGAT | | CTGTCT | 1 |
| 29 | H45_16 | GACAGAAAAAAGAGGTAGGGCGA | 2430 | GATCTGTCGCCCTACCTCTTTTT | 338 |
| | 3-191 | CAGATC | | TCTGTC | 2 |
| 29 | H45_16 | ACAGAAAAAAGAGGTAGGGCGAC | 2431 | AGATCTGTCGCCCTACCTCTTTT | 338 |
| | 4-192 | AGATCT | | TTCTGT | 3 |
| 29 | H45_16 | CAGAAAAAAGAGGTAGGGCGACA | 2432 | TAGATCTGTCGCCCTACCTCTTT | 338 |
| | 5-193 | GATCTA | | TTTCTG | 4 |
| 29 | H45_16 | AGAAAAAAGAGGTAGGGCGACAG | 2433 | TTAGATCTGTCGCCCTACCTCTT | 338 |
| | 6-194 | ATCTAA | | TTTTCT | 5 |
| 29 | H45_16 | GAAAAAAGAGGTAGGGCGACAGA | 2434 | ATTAGATCTGTCGCCCTACCTCT | 338 |
| | 7-195 | TCTAAT | | TTTTTC | 6 |
| 29 | H45_16 | AAAAAAGAGGTAGGGCGACAGAT | 2435 | TATTAGATCTGTCGCCCTACCTC | 338 |
| | 8-196 | CTAATA | | TTTTTT | 7 |
| 29 | H45_16 | AAAAAGAGGTAGGGCGACAGATC | 2436 | CTATTAGATCTGTCGCCCTACCT | 338 |
| | 9-197 | TAATAG | | CTTTTT | 8 |
| 29 | H45_17 | AAAAGAGGTAGGGCGACAGATCT | 2437 | CCTATTAGATCTGTCGCCCTACC | 338 |
| | 0-198 | AATAGG | | TCTTTT | 9 |
| 29 | H45_17 | AAAGAGGTAGGGCGACAGATCTA | 2438 | TCCTATTAGATCTGTCGCCCTAC | 339 |
| | 1-199 | ATAGGA | | CTCTTT | 0 |
| 29 | H45_17 | AAGAGGTAGGGCGACAGATCTAA | 2439 | TTCCTATTAGATCTGTCGCCCTA | 339 |
| | 2-200 | TAGGAA | | CCTCTT | 1 |
| 29 | H45_17 | AGAGGTAGGGCGACAGATCTAAT | 2440 | ATTCCTATTAGATCTGTCGCCCT | 339 |
| | 3-201 | AGGAAT | | ACCTCT | 2 |
| 29 | H45_17 | GAGGTAGGGCGACAGATCTAATA | 2441 | CATTCCTATTAGATCTGTCGCCC | 339 |
| | 4-202 | GGAATG | | TACCTC | 3 |
| 29 | H45_17 | AGGTAGGGCGACAGATCTAATAG | 2442 | TCATTCCTATTAGATCTGTCGCC | 339 |
| | 5-203 | GAATGA | | CTACCT | 4 |
| 29 | H45_17 | GGTAGGGCGACAGATCTAATAGG | 2443 | TTCATTCCTATTAGATCTGTCGC | 339 |
| | 6-204 | AATGAA | | CCTACC | 5 |
| 29 | H45_17 | GTAGGGCGACAGATCTAATAGGA | 2444 | TTTCATTCCTATTAGATCTGTCG | 339 |
| | 7-205 | ATGAAA | | CCCTAC | 6 |
| 29 | H45_17 | TAGGGCGACAGATCTAATAGGAA | 2445 | TTTTCATTCCTATTAGATCTGTC | 339 |
| | 8-206 | TGAAAA | | GCCCTA | 7 |
| 29 | H45_17 | AGGGCGACAGATCTAATAGGAAT | 2446 | GTTTTCATTCCTATTAGATCTGT | 339 |
| | 9-207 | GAAAAC | | CGCCCT | 8 |
| 29 | H45_18 | GGGCGACAGATCTAATAGGAATG | 2447 | TGTTTTCATTCCTATTAGATCTG | 339 |
| | 0-208 | AAAACA | | TCGCCC | 9 |
| 29 | H45_18 | GGCGACAGATCTAATAGGAATGA | 2448 | ATGTTTTCATTCCTATTAGATCT | 340 |
| | 1-209 | AAACAT | | GTCGCC | 0 |
| 29 | H45_18 | GCGACAGATCTAATAGGAATGAA | 2449 | AATGTTTTCATTCCTATTAGATC | 340 |
| | 2-210 | AACATT | | TGTCGC | 1 |
| 29 | H45_18 | CGACAGATCTAATAGGAATGAAA | 2450 | AAATGTTTTCATTCCTATTAGAT | 340 |
| | 3-211 | ACATTT | | CTGTCG | 2 |
| 29 | H45_18 | GACAGATCTAATAGGAATGAAAA | 2451 | AAAATGTTTTCATTCCTATTAGA | 340 |
| | 4-212 | CATTTT | | TCTGTC | 3 |
| 29 | H45_18 | ACAGATCTAATAGGAATGAAAAC | 2452 | TAAAATGTTTTCATTCCTATTAG | 340 |
| | 5-213 | ATTTTA | | ATCTGT | 4 |
| 29 | H45_18 | CAGATCTAATAGGAATGAAAACA | 2453 | CTAAAATGTTTTCATTCCTATTA | 340 |
| | 6-214 | TTTTAG | | GATCTG | 5 |
| 29 | H45_18 | AGATCTAATAGGAATGAAAACAT | 2454 | GCTAAAATGTTTTCATTCCTATT | 340 |
| | 7-215 | TTTAGC | | AGATCT | 6 |
| 29 | H45_18 | GATCTAATAGGAATGAAAACATT | 2455 | TGCTAAAATGTTTTCATTCCTAT | 340 |
| | 8-216 | TTAGCA | | TAGATC | 7 |
| 29 | H45_18 | ATCTAATAGGAATGAAAACATTT | 2456 | CTGCTAAAATGTTTTCATTCCTA | 340 |
| | 9-217 | TAGCAG | | TTAGAT | 8 |
| 29 | H45_19 | TCTAATAGGAATGAAAACATTTT | 2457 | TCTGCTAAAATGTTTTCATTCCT | 340 |
| | 0-218 | AGCAGA | | ATTAGA | 9 |
| 29 | H45_19 | CTAATAGGAATGAAAACATTTTA | 2458 | GTCTGCTAAAATGTTTTCATTCC | 341 |
| | 1-219 | GCAGAC | | TATTAG | 0 |
| 29 | H45_19 | TAATAGGAATGAAAACATTTTAG | 2459 | AGTCTGCTAAAATGTTTTCATTC | 341 |
| | 2-220 | CAGACT | | CTATTA | 1 |
| 29 | H45_19 | AATAGGAATGAAAACATTTTAGC | 2460 | AAGTCTGCTAAAATGTTTTCATT | 341 |
| | 3-221 | AGACTT | | CCTATT | 2 |
| 29 | H45_19 | ATAGGAATGAAAACATTTTAGCA | 2461 | AAAGTCTGCTAAAATGTTTTCAT | 341 |
| | 4-222 | GACTTT | | TCCTAT | 3 |
| 29 | H45_19 | TAGGAATGAAAACATTTTAGCAG | 2462 | AAAAGTCTGCTAAAATGTTTTCA | 341 |
| | 5-223 | ACTTTT | | TTCCTA | 4 |
| 29 | H45_19 | AGGAATGAAAACATTTTAGCAGA | 2463 | AAAAAGTCTGCTAAAATGTTTTC | 341 |
| | 6-224 | CTTTTT | | ATTCCT | 5 |
| 29 | H45_19 | GGAATGAAAACATTTTAGCAGAC | 2464 | TAAAAAGTCTGCTAAAATGTTTT | 341 |
| | 7-225 | TTTTTA | | CATTCC | 6 |
| 29 | H45_19 | GAATGAAAACATTTTAGCAGACT | 2465 | TTAAAAAGTCTGCTAAAATGTTT | 341 |
| | 8-226 | TTTTAA | | TCATTC | 7 |
| 29 | H45_19 | AATGAAAACATTTTAGCAGACTT | 2466 | CTTAAAAAGTCTGCTAAAATGTT | 341 |
| | 9-227 | TTTAAG | | TTCATT | 8 |
| 29 | H45_20 | ATGAAAACATTTTAGCAGACTTT | 2467 | GCTTAAAAAGTCTGCTAAAATGT | 341 |
| | 0-228 | TTAAGC | | TTTCAT | 9 |
| 29 | H45_20 | TGAAAACATTTTAGCAGACTTTT | 2468 | AGCTTAAAAAGTCTGCTAAAATG | 342 |
| | 1-229 | TAAGCT | | TTTTCA | 0 |
| 29 | H45_20 | GAAAACATTTTAGCAGACTTTTT | 2469 | AAGCTTAAAAAGTCTGCTAAAAT | 342 |
| | 2-230 | AAGCTT | | GTTTTC | 1 |
| 29 | H45_20 | AAAACATTTTAGCAGACTTTTTA | 2470 | AAAGCTTAAAAAGTCTGCTAAAA | 342 |
| | 3-231 | AGCTTT | | TGTTTT | 2 |
| 29 | H45_20 | AAACATTTTAGCAGACTTTTTAA | 2471 | GAAAGCTTAAAAAGTCTGCTAAA | 342 |
| | 4-232 | GCTTTC | | ATGTTT | 3 |
| 29 | H45_20 | AACATTTTAGCAGACTTTTTAAG | 2472 | AGAAAGCTTAAAAAGTCTGCTAA | 342 |
| | 5-233 | CTTTCT | | AATGTT | 4 |
| 29 | H45_20 | ACATTTTAGCAGACTTTTTAAGC | 2473 | AAGAAAGCTTAAAAAGTCTGCTA | 342 |
| | 6-234 | TTTCTT | | AAATGT | 5 |
| 29 | H45_20 | CATTTTAGCAGACTTTTTAAGCT | 2474 | AAAGAAAGCTTAAAAAGTCTGCT | 342 |
| | 7-235 | TTCTTT | | AAAATG | 6 |
| 29 | H45_20 | ATTTTAGCAGACTTTTTAAGCTT | 2475 | TAAAGAAAGCTTAAAAAGTCTGC | 342 |
| | 8-236 | TCTTTA | | TAAAAT | 7 |
| 29 | H45_20 | TTTTAGCAGACTTTTTAAGCTTT | 2476 | CTAAAGAAAGCTTAAAAAGTCTG | 342 |
| | 9-237 | CTTTAG | | CTAAAA | 8 |
| 29 | H45_21 | TTTAGCAGACTTTTTAAGCTTTC | 2477 | TCTAAAGAAAGCTTAAAAAGTCT | 342 |
| | 0-238 | TTTAGA | | GCTAAA | 9 |
| 29 | H45_21 | TTAGCAGACTTTTTAAGCTTTCT | 2478 | TTCTAAAGAAAGCTTAAAAAGTC | 343 |
| | 1-239 | TTAGAA | | TGCTAA | 0 |
| 29 | H45_21 | TAGCAGACTTTTTAAGCTTTCTT | 2479 | CTTCTAAAGAAAGCTTAAAAAGT | 343 |
| | 2-240 | TAGAAG | | CTGCTA | 1 |
| 29 | H45_21 | AGCAGACTTTTTAAGCTTTCTTT | 2480 | TCTTCTAAAGAAAGCTTAAAAAG | 343 |
| | 3-241 | AGAAGA | | TCTGCT | 2 |
| 29 | H45_21 | GCAGACTTTTTAAGCTTTCTTTA | 2481 | TTCTTCTAAAGAAAGCTTAAAAA | 343 |
| | 4-242 | GAAGAA | | GTCTGC | 3 |
| 29 | H45_21 | CAGACTTTTTAAGCTTTCTTTAG | 2482 | ATTCTTCTAAAGAAAGCTTAAAA | 343 |
| | 5-243 | AAGAAT | | AGTCTG | 4 |
| 29 | H45_21 | AGACTTTTTAAGCTTTCTTTAGA | 2483 | TATTCTTCTAAAGAAAGCTTAAA | 343 |
| | 6-244 | AGAATA | | AAGTCT | 5 |
| 29 | H45_21 | GACTTTTTAAGCTTTCTTTAGAA | 2484 | ATATTCTTCTAAAGAAAGCTTAA | 343 |
| | 7-245 | GAATAT | | AAAGTC | 6 |
| 29 | H45_21 | ACTTTTTAAGCTTTCTTTAGAAG | 2485 | AATATTCTTCTAAAGAAAGCTTA | 343 |
| | 8-246 | AATATT | | AAAAGT | 7 |
| 29 | H45_21 | CTTTTTAAGCTTTCTTTAGAAGA | 2486 | AAATATTCTTCTAAAGAAAGCTT | 343 |
| | 9-247 | ATATTT | | AAAAAG | 8 |
| 29 | H45_22 | TTTTTAAGCTTTCTTTAGAAGAA | 2487 | GAAATATTCTTCTAAAGAAAGCT | 343 |
| | 0-248 | TATTTC | | TAAAAA | 9 |
| 30 | H45_15 | CAGCTGTCAGACAGAAAAAAGAG | 2488 | GCCCTACCTCTTTTTTCTGTCTG | 344 |
| | 4-183 | GTAGGGC | | ACAGCTG | 0 |
| 30 | H45_15 | AGCTGTCAGACAGAAAAAAGAGG | 2489 | CGCCCTACCTCTTTTTTCTGTCT | 344 |
| | 5-184 | TAGGGCG | | GACAGCT | 1 |
| 30 | H45_15 | GCTGTCAGACAGAAAAAAGAGGT | 2490 | TCGCCCTACCTCTTTTTTCTGTC | 344 |
| | 6-185 | AGGGCGA | | TGACAGC | 2 |
| 30 | H45_15 | CTGTCAGACAGAAAAAAGAGGTA | 2491 | GTCGCCCTACCTCTTTTTTCTGT | 344 |
| | 7-186 | GGGCGAC | | CTGACAG | 3 |
| 30 | H45_15 | TGTCAGACAGAAAAAAGAGGTAG | 2492 | TGTCGCCCTACCTCTTTTTTCTG | 344 |
| | 8-187 | GGCGACA | | TCTGACA | 4 |
| 30 | H45_15 | GTCAGACAGAAAAAAGAGGTAGG | 2493 | CTGTCGCCCTACCTCTTTTTTCT | 344 |
| | 9-188 | GCGACAG | | GTCTGAC | 5 |
| 30 | H45_16 | TCAGACAGAAAAAAGAGGTAGGG | 2494 | TCTGTCGCCCTACCTCTTTTTTC | 344 |
| | 0-189 | CGACAGA | | TGTCTGA | 6 |
| 30 | H45_16 | CAGACAGAAAAAAGAGGTAGGGC | 2495 | ATCTGTCGCCCTACCTCTTTTTT | 344 |
| | 1-190 | GACAGAT | | CTGTCTG | 7 |
| 30 | H45_16 | AGACAGAAAAAAGAGGTAGGGCG | 2496 | GATCTGTCGCCCTACCTCTTTTT | 344 |
| | 2-191 | ACAGATC | | TCTGTCT | 8 |
| 30 | H45_16 | GACAGAAAAAAGAGGTAGGGCGA | 2497 | AGATCTGTCGCCCTACCTCTTTT | 344 |
| | 3-192 | CAGATCT | | TTCTGTC | 9 |
| 30 | H45_16 | ACAGAAAAAAGAGGTAGGGCGAC | 2498 | TAGATCTGTCGCCCTACCTCTTT | 345 |
| | 4-193 | AGATCTA | | TTTCTGT | 0 |
| 30 | H45_16 | CAGAAAAAAGAGGTAGGGCGACA | 2499 | TTAGATCTGTCGCCCTACCTCTT | 345 |
| | 5-194 | GATCTAA | | TTTTCTG | 1 |
| 30 | H45_16 | AGAAAAAAGAGGTAGGGCGACAG | 2500 | ATTAGATCTGTCGCCCTACCTCT | 345 |
| | 6-195 | ATCTAAT | | TTTTTCT | 2 |
| 30 | H45_16 | GAAAAAAGAGGTAGGGCGACAGA | 2501 | TATTAGATCTGTCGCCCTACCTC | 345 |
| | 7-196 | TCTAATA | | TTTTTTC | 3 |
| 30 | H45_16 | AAAAAAGAGGTAGGGCGACAGAT | 2502 | CTATTAGATCTGTCGCCCTACCT | 345 |
| | 8-197 | CTAATAG | | CTTTTTT | 4 |
| 30 | H45_16 | AAAAAGAGGTAGGGCGACAGATC | 2503 | CCTATTAGATCTGTCGCCCTACC | 345 |
| | 9-198 | TAATAGG | | TCTTTTT | 5 |
| 30 | H45_17 | AAAAGAGGTAGGGCGACAGATCT | 2504 | TCCTATTAGATCTGTCGCCCTAC | 345 |
| | 0-199 | AATAGGA | | CTCTTTT | 6 |
| 30 | H45_17 | AAAGAGGTAGGGCGACAGATCTA | 2505 | TTCCTATTAGATCTGTCGCCCTA | 345 |
| | 1-200 | ATAGGAA | | CCTCTTT | 7 |
| 30 | H45_17 | AAGAGGTAGGGCGACAGATCTAA | 2506 | ATTCCTATTAGATCTGTCGCCCT | 345 |
| | 2-201 | TAGGAAT | | ACCTCTT | 8 |
| 30 | H45_17 | AGAGGTAGGGCGACAGATCTAAT | 2507 | CATTCCTATTAGATCTGTCGCCC | 345 |
| | 3-202 | AGGAATG | | TACCTCT | 9 |
| 30 | H45_17 | GAGGTAGGGCGACAGATCTAATA | 2508 | TCATTCCTATTAGATCTGTCGCC | 346 |
| | 4-203 | GGAATGA | | CTACCTC | 0 |
| 30 | H45_17 | AGGTAGGGCGACAGATCTAATAG | 2509 | TTCATTCCTATTAGATCTGTCGC | 346 |
| | 5-204 | GAATGAA | | CCTACCT | 1 |
| 30 | H45_17 | GGTAGGGCGACAGATCTAATAGG | 2510 | TTTCATTCCTATTAGATCTGTCG | 346 |
| | 6-205 | AATGAAA | | CCCTACC | 2 |
| 30 | H45_17 | GTAGGGCGACAGATCTAATAGGA | 2511 | TTTTCATTCCTATTAGATCTGTC | 346 |
| | 7-206 | ATGAAAA | | GCCCTAC | 3 |
| 30 | H45_17 | TAGGGCGACAGATCTAATAGGAA | 2512 | GTTTTCATTCCTATTAGATCTGT | 346 |
| | 8-207 | TGAAAAC | | CGCCCTA | 4 |
| 30 | H45_17 | AGGGCGACAGATCTAATAGGAAT | 2513 | TGTTTTCATTCCTATTAGATCTG | 346 |
| | 9-208 | GAAAACA | | TCGCCCT | 5 |
| 30 | H45_18 | GGGCGACAGATCTAATAGGAATG | 2514 | ATGTTTTCATTCCTATTAGATCT | 346 |
| | 0-209 | AAAACAT | | GTCGCCC | 6 |
| 30 | H45_18 | GGCGACAGATCTAATAGGAATGA | 2515 | AATGTTTTCATTCCTATTAGATC | 346 |
| | 1-210 | AAACATT | | TGTCGCC | 7 |
| 30 | H45_18 | GCGACAGATCTAATAGGAATGAA | 2516 | AAATGTTTTCATTCCTATTAGAT | 346 |
| | 2-211 | AACATTT | | CTGTCGC | 8 |
| 30 | H45_18 | CGACAGATCTAATAGGAATGAAA | 2517 | AAAATGTTTTCATTCCTATTAGA | 346 |
| | 3-212 | ACATTTT | | TCTGTCG | 9 |
| 30 | H45_18 | GACAGATCTAATAGGAATGAAAA | 2518 | TAAAATGTTTTCATTCCTATTAG | 347 |
| | 4-213 | CATTTTA | | ATCTGTC | 0 |
| 30 | H45_18 | ACAGATCTAATAGGAATGAAAAC | 2519 | CTAAAATGTTTTCATTCCTATTA | 347 |
| | 5-214 | ATTTTAG | | GATCTGT | 1 |
| 30 | H45_18 | CAGATCTAATAGGAATGAAAACA | 2520 | GCTAAAATGTTTTCATTCCTATT | 347 |
| | 6-215 | TTTTAGC | | AGATCTG | 2 |
| 30 | H45_18 | AGATCTAATAGGAATGAAAACAT | 2521 | TGCTAAAATGTTTTCATTCCTAT | 347 |
| | 7-216 | TTTAGCA | | TAGATCT | 3 |
| 30 | H45_18 | GATCTAATAGGAATGAAAACATT | 2522 | CTGCTAAAATGTTTTCATTCCTA | 347 |
| | 8-217 | TTAGCAG | | TTAGATC | 4 |
| 30 | H45_18 | ATCTAATAGGAATGAAAACATTT | 2523 | TCTGCTAAAATGTTTTCATTCCT | 347 |
| | 9-218 | TAGCAGA | | ATTAGAT | 5 |
| 30 | H45_19 | TCTAATAGGAATGAAAACATTTT | 2524 | GTCTGCTAAAATGTTTTCATTCC | 347 |
| | 0-219 | AGCAGAC | | TATTAGA | 6 |
| 30 | H45_19 | CTAATAGGAATGAAAACATTTTA | 2525 | AGTCTGCTAAAATGTTTTCATTC | 347 |
| | 1-220 | GCAGACT | | CTATTAG | 7 |
| 30 | H45_19 | TAATAGGAATGAAAACATTTTAG | 2526 | AAGTCTGCTAAAATGTTTTCATT | 347 |
| | 2-221 | CAGACTT | | CCTATTA | 8 |
| 30 | H45_19 | AATAGGAATGAAAACATTTTAGC | 2527 | AAAGTCTGCTAAAATGTTTTCAT | 347 |
| | 3-222 | AGACTTT | | TCCTATT | 9 |
| 30 | H45_19 | ATAGGAATGAAAACATTTTAGCA | 2528 | AAAAGTCTGCTAAAATGTTTTCA | 348 |
| | 4-223 | GACTTTT | | TTCCTAT | 0 |
| 30 | H45_19 | TAGGAATGAAAACATTTTAGCAG | 2529 | AAAAAGTCTGCTAAAATGTTTTC | 348 |
| | 5-224 | ACTTTTT | | ATTCCTA | 1 |
| 30 | H45_19 | AGGAATGAAAACATTTTAGCAGA | 2530 | TAAAAAGTCTGCTAAAATGTTTT | 348 |
| | 6-225 | CTTTTTA | | CATTCCT | 2 |
| 30 | H45_19 | GGAATGAAAACATTTTAGCAGAC | 2531 | TTAAAAAGTCTGCTAAAATGTTT | 348 |
| | 7-226 | TTTTTAA | | TCATTCC | 3 |
| 30 | H45_19 | GAATGAAAACATTTTAGCAGACT | 2532 | CTTAAAAAGTCTGCTAAAATGTT | 348 |
| | 8-227 | TTTTAAG | | TTCATTC | 4 |
| 30 | H45_19 | AATGAAAACATTTTAGCAGACTT | 2533 | GCTTAAAAAGTCTGCTAAAATGT | 348 |
| | 9-228 | TTTAAGC | | TTTCATT | 5 |
| 30 | H45_20 | ATGAAAACATTTTAGCAGACTTT | 2534 | AGCTTAAAAAGTCTGCTAAAATG | 348 |
| | 0-229 | TTAAGCT | | TTTTCAT | 6 |
| 30 | H45_20 | TGAAAACATTTTAGCAGACTTTT | 2535 | AAGCTTAAAAAGTCTGCTAAAAT | 348 |
| | 1-230 | TAAGCTT | | GTTTTCA | 7 |
| 30 | H45_20 | GAAAACATTTTAGCAGACTTTTT | 2536 | AAAGCTTAAAAAGTCTGCTAAAA | 348 |
| | 2-231 | AAGCTTT | | TGTTTTC | 8 |
| 30 | H45_20 | AAAACATTTTAGCAGACTTTTTA | 2537 | GAAAGCTTAAAAAGTCTGCTAAA | 348 |
| | 3-232 | AGCTTTC | | ATGTTTT | 9 |
| 30 | H45_20 | AAACATTTTAGCAGACTTTTTAA | 2538 | AGAAAGCTTAAAAAGTCTGCTAA | 349 |
| | 4-233 | GCTTTCT | | AATGTTT | 0 |
| 30 | H45_20 | AACATTTTAGCAGACTTTTTAAG | 2539 | AAGAAAGCTTAAAAAGTCTGCTA | 349 |
| | 5-234 | CTTTCTT | | AAATGTT | 1 |
| 30 | H45_20 | ACATTTTAGCAGACTTTTTAAGC | 2540 | AAAGAAAGCTTAAAAAGTCTGCT | 349 |
| | 6-235 | TTTCTTT | | AAAATGT | 2 |
| 30 | H45_20 | CATTTTAGCAGACTTTTTAAGCT | 2541 | TAAAGAAAGCTTAAAAAGTCTGC | 349 |
| | 7-236 | TTCTTTA | | TAAAATG | 3 |
| 30 | H45_20 | ATTTTAGCAGACTTTTTAAGCTT | 2542 | CTAAAGAAAGCTTAAAAAGTCTG | 349 |
| | 8-237 | TCTTTAG | | CTAAAAT | 4 |
| 30 | H45_20 | TTTTAGCAGACTTTTTAAGCTTT | 2543 | TCTAAAGAAAGCTTAAAAAGTCT | 349 |
| | 9-238 | CTTTAGA | | GCTAAAA | 5 |
| 30 | H45_21 | TTTAGCAGACTTTTTAAGCTTTC | 2544 | TTCTAAAGAAAGCTTAAAAAGTC | 349 |
| | 0-239 | TTTAGAA | | TGCTAAA | 6 |
| 30 | H45_21 | TTAGCAGACTTTTTAAGCTTTCT | 2545 | CTTCTAAAGAAAGCTTAAAAAGT | 349 |
| | 1-240 | TTAGAAG | | CTGCTAA | 7 |
| 30 | H45_21 | TAGCAGACTTTTTAAGCTTTCTT | 2546 | TCTTCTAAAGAAAGCTTAAAAAG | 349 |
| | 2-241 | TAGAAGA | | TCTGCTA | 8 |
| 30 | H45_21 | AGCAGACTTTTTAAGCTTTCTTT | 2547 | TTCTTCTAAAGAAAGCTTAAAAA | 349 |
| | 3-242 | AGAAGAA | | GTCTGCT | 9 |
| 30 | H45_21 | GCAGACTTTTTAAGCTTTCTTTA | 2548 | ATTCTTCTAAAGAAAGCTTAAAA | 350 |
| | 4-243 | GAAGAAT | | AGTCTGC | 0 |
| 30 | H45_21 | CAGACTTTTTAAGCTTTCTTTAG | 2549 | TATTCTTCTAAAGAAAGCTTAAA | 350 |
| | 5-244 | AAGAATA | | AAGTCTG | 1 |
| 30 | H45_21 | AGACTTTTTAAGCTTTCTTTAGA | 2550 | ATATTCTTCTAAAGAAAGCTTAA | 350 |
| | 6-245 | AGAATAT | | AAAGTCT | 2 |
| 30 | H45_21 | GACTTTTTAAGCTTTCTTTAGAA | 2551 | AATATTCTTCTAAAGAAAGCTTA | 350 |
| | 7-246 | GAATATT | | AAAAGTC | 3 |
| 30 | H45_21 | ACTTTTTAAGCTTTCTTTAGAAG | 2552 | AAATATTCTTCTAAAGAAAGCTT | 350 |
| | 8-247 | AATATTT | | AAAAAGT | 4 |
| 30 | H45_21 | CTTTTTAAGCTTTCTTTAGAAGA | 2553 | GAAATATTCTTCTAAAGAAAGCT | 350 |
| | 9-248 | ATATTTC | | TAAAAAG | 5 |
| 30 | H45_22 | TTTTTAAGCTTTCTTTAGAAGAA | 2554 | TGAAATATTCTTCTAAAGAAAGC | 350 |
| | 0-249 | TATTTCA | | TTAAAAA | 6 |

[0469] In one embodiment, the third antisense oligomer of the present invention comprises a base sequence complementary to:
[0470] (a) any one base sequence selected from the group consisting of SEQ ID NOs: 1603 to 2554;
[0471] (b) a base sequence that hybridizes under stringent conditions to a base sequence complementary to any one base sequence selected from the group consisting of SEQ ID NOs: 1603 to 2554;
[0472] (c) a base sequence that has at least 85% identity with any one base sequence selected from the group consisting of SEQ ID NOs: 1603 to 2554, and has a length within ±15% of the length of the any one base sequence selected; or
[0473] (d) a partial base sequence of any one base sequence selected from the group consisting of the base sequences (a), (b), and (c).

[0474] In one embodiment, the third antisense oligomer comprises or consists of a base sequence complementary to:
[0475] (a) any one base sequence selected from the group consisting of SEQ ID NOs: 1611 to 1654, 1664 to 1707, 1718 to 1761, 1773 to 1816, 1829 to 1872, 1886 to 1929, 1944 to 1987, 2003 to 2046, 2063 to 2106, 2124 to 2167, 2186 to 2229, 2249 to 2292, 2313 to 2356, 2378 to 2421, 2444 to 2487, and 2511 to 2554;
[0476] (b) a base sequence that hybridizes under stringent conditions to a base sequence complementary to any one base sequence selected from the group consisting of SEQ ID NOs: 1611 to 1654, 1664 to 1707, 1718 to 1761, 1773 to 1816, 1829 to 1872, 1886 to 1929, 1944 to 1987, 2003 to 2046, 2063 to 2106, 2124 to 2167, 2186 to 2229, 2249 to 2292, 2313 to 2356, 2378 to 2421, 2444 to 2487, and 2511 to 2554;
[0477] (c) a base sequence that has at least 85% identity with any one base sequence selected from the group consisting of SEQ ID NOs: 1611 to 1654, 1664 to 1707, 1718 to 1761, 1773 to 1816, 1829 to 1872, 1886 to 1929, 1944 to 1987, 2003 to 2046, 2063 to 2106, 2124 to 2167, 2186 to 2229, 2249 to 2292, 2313 to 2356, 2378 to 2421, 2444 to 2487, and 2511 to 2554, and has a length within +15% of the length of the any one base sequence selected; or
[0478] (d) a partial base sequence of any one base sequence selected from the group consisting of the base sequences (a), (b), and (c).

[0479] In one embodiment, the third antisense oligomer comprises or consists of a base sequence complementary to:
[0480] (a) any one base sequence selected from the group consisting of SEQ ID NOs: 1614 to 1654, 1667 to 1707, 1721 to 1761, 1776 to 1816, 1832 to 1872, 1889 to 1929, 1947 to 1987, 2006 to 2046, 2066 to 2106, 2127 to 2167, 2189 to 2229, 2252 to 2292, 2316 to 2356, 2381 to 2421, 2447 to 2487, and 2514 to 2554;
[0481] (b) a base sequence that hybridizes under stringent conditions to a base sequence complementary to any one base sequence selected from the group consisting of SEQ ID NOs: 1614 to 1654, 1667 to 1707, 1721 to 1761, 1776 to 1816, 1832 to 1872, 1889 to 1929, 1947 to 1987, 2006 to 2046, 2066 to 2106, 2127 to 2167, 2189 to 2229, 2252 to 2292, 2316 to 2356, 2381 to 2421, 2447 to 2487, and 2514 to 2554;
[0482] (c) a base sequence that has at least 85% identity with any one base sequence selected from the group consisting of SEQ ID NOs: 1614 to 1654, 1667 to 1707, 1721 to 1761, 1776 to 1816, 1832 to 1872, 1889 to 1929, 1947 to 1987, 2006 to 2046, 2066 to 2106, 2127 to 2167, 2189 to 2229, 2252 to 2292, 2316 to 2356, 2381 to 2421, 2447 to 2487, and 2514 to 2554, and has a length within +15% of the length of the any one base sequence selected; or
[0483] (d) a partial base sequence of any one base sequence selected from the group consisting of the base sequences (a), (b), and (c).

[0484] In one embodiment, the third antisense oligomer comprises or consists of a base sequence complementary to:
[0485] (a) any one base sequence selected from the group consisting of SEQ ID NOs: 1617 to 1654, 1670 to 1707, 1724 to 1761, 1779 to 1816, 1835 to 1872, 1892 to 1929, 1950 to 1987, 2009 to 2046, 2069 to 2106, 2130 to 2167, 2192 to 2229, 2255 to 2292, 2319 to 2356, 2384 to 2421, 2450 to 2487, and 2517 to 2554;
[0486] (b) a base sequence that hybridizes under stringent conditions to a base sequence complementary to any one base sequence selected from the group consisting of SEQ ID NOs: 1617 to 1654, 1670 to 1707, 1724 to 1761, 1779 to 1816, 1835 to 1872, 1892 to 1929, 1950 to 1987, 2009 to 2046, 2069 to 2106, 2130 to 2167, 2192 to 2229, 2255 to 2292, 2319 to 2356, 2384 to 2421, 2450 to 2487, and 2517 to 2554;
[0487] (c) a base sequence that has at least 85% identity with any one base sequence selected from the group consisting of SEQ ID NOs: 1617 to 1654, 1670 to 1707, 1724 to 1761, 1779 to 1816, 1835 to 1872, 1892 to 1929, 1950 to 1987, 2009 to 2046, 2069 to 2106, 2130 to 2167, 2192 to 2229, 2255 to 2292, 2319 to 2356, 2384 to 2421, 2450 to 2487, and 2517 to 2554, and has a length within +15% of the length of the any one base sequence selected; or
[0488] (d) a partial base sequence of any one base sequence selected from the group consisting of the base sequences (a), (b), and (c).

[0489] Herein, the base sequence (c) is a mutant type of the base sequence (a), and examples of such a mutant type also include:
[0490] (c-1) a base sequence that has at least 85% identity with any one base sequence selected from the group consisting of SEQ ID NOs: 1603 to 2554, and has a length within ±15% of the length of the any one base sequence selected,
[0491] (c-2) a base sequence that has at least 86% identity with any one base sequence selected from the group consisting of SEQ ID NOs: 1603 to 2554, and has a length within ±14% of the length of the any one base sequence selected,
[0492] (c-3) a base sequence that has at least 87% identity with any one base sequence selected from the group consisting of SEQ ID NOs: 1603 to 2554, and has a length within ±13% of the length of the any one base sequence selected,
[0493] (c-4) a base sequence that has at least 88% identity with any one base sequence selected from the group consisting of SEQ ID NOs: 1603 to 2554, and has a length within ±12% of the length of the any one base sequence selected,
[0494] (c-5) a base sequence that has at least 89% identity with any one base sequence selected from the group consisting of SEQ ID NOs: 1603 to 2554, and has a length within ±11% of the length of the any one base sequence selected,
[0495] (c-6) a base sequence that has at least 90% identity with any one base sequence selected from the group consisting of SEQ ID NOs: 1603 to 2554, and has a length within ±10% of the length of the any one base sequence selected,
[0496] (c-7) a base sequence that has at least 91% identity with any one base sequence selected from the group consisting of SEQ ID NOS: 1603 to 2554, and has a length within ±9% of the length of the any one base sequence selected,
[0497] (c-8) a base sequence that has at least 92% identity with any one base sequence selected from the group consisting of SEQ ID NOs: 1603 to 2554, and has a length within ±8% of the length of the any one base sequence selected,
[0498] (c-9) a base sequence that has at least 93% identity with any one base sequence selected from the group consisting of SEQ ID NOs: 1603 to 2554, and has a length within ±7% of the length of the any one base sequence selected,
[0499] (c-10) a base sequence that has at least 94% identity with any one base sequence selected from the group consisting of SEQ ID NOs: 1603 to 2554, and has a length within ±6% of the length of the any one base sequence selected,
[0500] (c-11) a base sequence that has at least 95% identity with any one base sequence selected from the group consisting of SEQ ID NOs: 1603 to 2554, and has a length within ±5% of the length of the any one base sequence selected,
[0501] (c-12) a base sequence that has at least 96% identity with any one base sequence selected from the group consisting of SEQ ID NOs: 1603 to 2554, and has a length within ±4% of the length of the any one base sequence selected,
[0502] (c-13) a base sequence that has at least 97% identity with any one base sequence selected from the group consisting of SEQ ID NOs: 1603 to 2554, and has a length within ±3% of the length of the any one base sequence selected,
[0503] (c-14) a base sequence that has at least 98% identity with any one base sequence selected from the group consisting of SEQ ID NOs: 1603 to 2554, and has a length within ±2% of the length of the any one base sequence selected,
[0504] (c-15) a base sequence that has at least 99% identity with any one base sequence selected from the group consisting of SEQ ID NOs: 1603 to 2554, and has a length within ±1% of the length of the any one base sequence selected, and
[0505] (c-16) a base sequence that has at least 99.5% identity with any one base sequence selected from the group consisting of SEQ ID NOs: 1603 to 2554, and has a length within ±0.5% of the length of the any one base sequence selected.

[0506] In one embodiment, the third antisense oligomer comprises or consists of:
[0507] (a) any one base sequence selected from the group consisting of SEQ ID NOs: 2555 to 3506; or
[0508] (b) a base sequence that has at least 85% identity with any one base sequence selected from the group consisting of SEQ ID NOs: 2555 to 3506, and has a length within ±15% of the length of the any one base sequence selected.

[0509] Herein, the base sequence (b) is a mutant type of the base sequence (a), and examples of such a mutant type also include:
[0510] (b-1) a base sequence that has at least 85% identity with any one base sequence selected from the group consisting of SEQ ID NOs: 2555 to 3506, and has a length within ±15% of the length of the any one base sequence selected,
[0511] (b-2) a base sequence that has at least 86% identity with any one base sequence selected from the group consisting of SEQ ID NOs: 2555 to 3506, and has a length within #14% of the length of the any one base sequence selected,
[0512] (b-3) a base sequence that has at least 87% identity with any one base sequence selected from the group consisting of SEQ ID NOs: 2555 to 3506, and has a length within ±13% of the length of the any one base sequence selected,
[0513] (b-4) a base sequence that has at least 88% identity with any one base sequence selected from the group consisting of SEQ ID NOs: 2555 to 3506, and has a length within ±12% of the length of the any one base sequence selected,
[0514] (b-5) a base sequence that has at least 89% identity with any one base sequence selected from the group consisting of SEQ ID NOs: 2555 to 3506, and has a length within ±11% of the length of the any one base sequence selected,
[0515] (b-6) a base sequence that has at least 90% identity with any one base sequence selected from the group consisting of SEQ ID NOs: 2555 to 3506, and has a length within ±10% of the length of the any one base sequence selected,
[0516] (b-7) a base sequence that has at least 91% identity with any one base sequence selected from the group consisting of SEQ ID NOs: 2555 to 3506, and has a length within ±9% of the length of the any one base sequence selected,
[0517] (b-8) a base sequence that has at least 92% identity with any one base sequence selected from the group consisting of SEQ ID NOs: 2555 to 3506, and has a length within ±8% of the length of the any one base sequence selected,
[0518] (b-9) a base sequence that has at least 93% identity with any one base sequence selected from the group consisting of SEQ ID NOs: 2555 to 3506, and has a length within ±7% of the length of the any one base sequence selected,
[0519] (b-10) a base sequence that has at least 94% identity with any one base sequence selected from the group consisting of SEQ ID NOs: 2555 to 3506, and has a length within ±6% of the length of the any one base sequence selected,
[0520] (b-11) a base sequence that has at least 95% identity with any one base sequence selected from the group consisting of SEQ ID NOs: 2555 to 3506, and has a length within ±5% of the length of the any one base sequence selected,
[0521] (b-12) a base sequence that has at least 96% identity with any one base sequence selected from the group consisting of SEQ ID NOs: 2555 to 3506, and has a length within ±4% of the length of the any one base sequence selected,
[0522] (b-13) a base sequence that has at least 97% identity with any one base sequence selected from the group consisting of SEQ ID NOs: 2555 to 3506, and has a length within ±3% of the length of the any one base sequence selected,
[0523] (b-14) a base sequence that has at least 98% identity with any one base sequence selected from the group consisting of SEQ ID NOs: 2555 to 3506, and has a length within ±2% of the length of the any one base sequence selected,
[0524] (b-15) a base sequence that has at least 99% identity with any one base sequence selected from the group consisting of SEQ ID NOs: 2555 to 3506, and has a length within ±1% of the length of the any one base sequence selected, and
[0525] (b-16) a base sequence that has at least 99.5% identity with any one base sequence selected from the group consisting of SEQ ID NOs: 2555 to 3506, and has a length within ±0.5% of the length of the any one base sequence selected.

[0526] In one embodiment, the third antisense oligomer of the present invention comprises or consists of any one base sequence selected from the group consisting of SEQ ID NOs: 2555 to 3506.

[0527] In one embodiment, the third antisense oligomer comprises or consists of a base sequence selected from the group consisting of SEQ ID NOS: 3060, 3065, 3077, 3082, 3087, 3090, 3096, 3108, 3119, and 3320. In one embodiment, the third antisense oligomer comprises or consists of a base sequence selected from the group consisting of SEQ ID NOs: 3077, 3082, 3087, 3090, 3096, 3108, and 3119. In one embodiment, the third antisense oligomer comprises or consists of a base sequence selected from the group consisting of SEQ ID NOs: 3082, 3087, 3090, 3096, 3108, and 3119.

[0528] A combination of the first unit oligomer and the second unit oligomer comprised in the first antisense oligomer of the present invention, and the second antisense oligomer of the present invention (optionally the third antisense oligomer of the present invention) is not limited, and any combination can be used.

[0529] In one embodiment, the first antisense oligomer comprises the first unit oligomer and the second unit oligomer from the 5′ ends in this order, and
[0530] the first unit oligomer comprises a base sequence of SEQ ID NO: 1201, the second unit oligomer comprises a base sequence of SEQ ID NO: 151, and the second antisense oligomer comprises or consists of a base sequence of SEQ ID NO: 4950,
[0531] the first unit oligomer comprises a base sequence of SEQ ID NO: 1201, the second unit oligomer comprises a base sequence of SEQ ID NO: 201, and the second antisense oligomer comprises or consists of a base sequence of SEQ ID NO: 4950,
[0532] the first unit oligomer comprises a base sequence of SEQ ID NO: 1201, the second unit oligomer comprises a base sequence of SEQ ID NO: 203, and the second antisense oligomer comprises or consists of a base sequence of SEQ ID NO: 4950,
[0533] the first unit oligomer comprises a base sequence of SEQ ID NO: 1201, the second unit oligomer comprises a base sequence of SEQ ID NO: 205, and the second antisense oligomer comprises or consists of a base sequence of SEQ ID NO: 4950,
[0534] the first unit oligomer comprises a base sequence of SEQ ID NO: 1239, the second unit oligomer comprises a base sequence of SEQ ID NO: 114, and the second antisense oligomer comprises or consists of a base sequence of SEQ ID NO: 4950,
[0535] the first unit oligomer comprises a base sequence of SEQ ID NO: 1224, the second unit oligomer comprises a base sequence of SEQ ID NO: 124, and the second antisense oligomer comprises or consists of a base sequence of SEQ ID NO: 4950,
[0536] the first unit oligomer comprises a base sequence of SEQ ID NO: 1180, the second unit oligomer comprises a base sequence of SEQ ID NO: 151, and the second antisense oligomer comprises or consists of a base sequence of SEQ ID NO: 4950,
[0537] the first unit oligomer comprises a base sequence of SEQ ID NO: 1190, the second unit oligomer comprises a base sequence of SEQ ID NO: 151, and the second antisense oligomer comprises or consists of a base sequence of SEQ ID NO: 4950,
[0538] the first unit oligomer comprises a base sequence of SEQ ID NO: 1212, the second unit oligomer comprises a base sequence of SEQ ID NO: 151, and the second antisense oligomer comprises or consists of a base sequence of SEQ ID NO: 4950,
[0539] the first unit oligomer comprises a base sequence of SEQ ID NO: 1222, the second unit oligomer comprises a base sequence of SEQ ID NO: 151, and the second antisense oligomer comprises or consists of a base sequence of SEQ ID NO: 4950,
[0540] the first unit oligomer comprises a base sequence of SEQ ID NO: 1201, the second unit oligomer comprises a base sequence of SEQ ID NO: 151, and the second antisense oligomer comprises or consists of a base sequence of SEQ ID NO: 4698,
[0541] the first unit oligomer comprises a base sequence of SEQ ID NO: 1201, the second unit oligomer comprises a base sequence of SEQ ID NO: 151, and the second antisense oligomer comprises or consists of a base sequence of SEQ ID NO: 4702,
[0542] the first unit oligomer comprises a base sequence of SEQ ID NO: 1201, the second unit oligomer comprises a base sequence of SEQ ID NO: 151, and the second antisense oligomer comprises or consists of a base sequence of SEQ ID NO: 4752,
[0543] the first unit oligomer comprises a base sequence of SEQ ID NO: 1201, the second unit oligomer comprises a base sequence of SEQ ID NO: 151, and the second antisense oligomer comprises or consists of a base sequence of SEQ ID NO: 4923,
[0544] the first unit oligomer comprises a base sequence of SEQ ID NO: 1201, the second unit oligomer comprises a base sequence of SEQ ID NO: 151, and the second antisense oligomer comprises or consists of a base sequence of SEQ ID NO: 4926,
[0545] the first unit oligomer comprises a base sequence of SEQ ID NO: 1201, the second unit oligomer comprises a base sequence of SEQ ID NO: 151, and the second antisense oligomer comprises or consists of a base sequence of SEQ ID NO: 4936,
[0546] the first unit oligomer comprises a base sequence of SEQ ID NO: 1201, the second unit oligomer comprises a base sequence of SEQ ID NO: 151, and the second antisense oligomer comprises or consists of a base sequence of SEQ ID NO: 4977, or
[0547] the first unit oligomer comprises a base sequence of SEQ ID NO: 1180, the second unit oligomer comprises a base sequence of SEQ ID NO: 151, and the second antisense oligomer comprises or consists of a base sequence of SEQ ID NO: 4977.

[0548] In one embodiment, the first antisense oligomer comprises the first unit oligomer and the second unit oligomer from the 5′ ends in this order, the first unit oligomer comprises any one base sequence selected from SEQ ID NOs: 907 to 1602, the second unit oligomer comprises any one base sequence selected from SEQ ID NOS: 106 to 210, and the second antisense oligomer comprises any one base sequence selected from SEQ ID NOs: 4299 to 5090. In one embodiment, the first antisense oligomer comprises the first unit oligomer and the second unit oligomer from the 5′ ends in this order, the first unit oligomer comprises a base sequence of SEQ ID No: 1201, the second unit oligomer comprises a base sequence of SEQ ID NO: 151, and the second antisense oligomer comprises a base sequence of SEQ ID NO: 4950 or 4880 (preferably 4950).

[0549] In one embodiment, the first antisense oligomer comprises the first unit oligomer and the second unit oligomer from the 5′ ends in this order, and
[0550] the first unit oligomer comprises or consists of a base sequence of SEQ ID NO: 1201, the second unit oligomer comprises or consists of a base sequence of SEQ ID NO: 151, the second antisense oligomer comprises or consists of a base sequence of SEQ ID NO: 4950, and the third antisense oligomer comprises or consists of a base sequence of SEQ ID NO: 3082,
[0551] the first unit oligomer comprises or consists of a base sequence of SEQ ID NO: 1201, the second unit oligomer comprises or consists of a base sequence of SEQ ID NO: 201, the second antisense oligomer comprises or consists of a base sequence of SEQ ID NO: 4950, and the third antisense oligomer comprises or consists of a base sequence of SEQ ID NO: 3082,
[0552] the first unit oligomer comprises or consists of a base sequence of SEQ ID NO: 1201, the second unit oligomer comprises or consists of a base sequence of SEQ ID NO: 203, the second antisense oligomer comprises or consists of a base sequence of SEQ ID NO: 4950, and the third antisense oligomer comprises or consists of a base sequence of SEQ ID NO: 3082,
[0553] the first unit oligomer comprises or consists of a base sequence of SEQ ID NO: 1201, the second unit oligomer comprises or consists of a base sequence of SEQ ID NO: 205, the second antisense oligomer comprises or consists of a base sequence of SEQ ID NO: 4950, and the third antisense oligomer comprises or consists of a base sequence of SEQ ID NO: 3082,
[0554] the first unit oligomer comprises or consists of a base sequence of SEQ ID NO: 1239, the second unit oligomer comprises or consists of a base sequence of SEQ ID NO: 114, the second antisense oligomer comprises or consists of a base sequence of SEQ ID NO: 4950, and the third antisense oligomer comprises or consists of a base sequence of SEQ ID NO: 3082,
[0555] the first unit oligomer comprises or consists of a base sequence of SEQ ID NO: 1224, the second unit oligomer comprises or consists of a base sequence of SEQ ID NO: 124, the second antisense oligomer comprises or consists of a base sequence of SEQ ID NO: 4950, and the third antisense oligomer comprises or consists of a base sequence of SEQ ID NO: 3082,
[0556] the first unit oligomer comprises or consists of a base sequence of SEQ ID NO: 1180, the second unit oligomer comprises or consists of a base sequence of SEQ ID NO: 151, the second antisense oligomer comprises or consists of a base sequence of SEQ ID NO: 4950, and the third antisense oligomer comprises or consists of a base sequence of SEQ ID NO: 3082,
[0557] the first unit oligomer comprises or consists of a base sequence of SEQ ID NO: 1190, the second unit oligomer comprises or consists of a base sequence of SEQ ID NO: 151, the second antisense oligomer comprises or consists of a base sequence of SEQ ID NO: 4950, and the third antisense oligomer comprises or consists of a base sequence of SEQ ID NO: 3082,
[0558] the first unit oligomer comprises or consists of a base sequence of SEQ ID NO: 1212, the second unit oligomer comprises or consists of a base sequence of SEQ ID NO: 151, the second antisense oligomer comprises or consists of a base sequence of SEQ ID NO: 4950, and the third antisense oligomer comprises or consists of a base sequence of SEQ ID NO: 3082,
[0559] the first unit oligomer comprises or consists of a base sequence of SEQ ID NO: 1222, the second unit oligomer comprises or consists of a base sequence of SEQ ID NO: 151, the second antisense oligomer comprises or consists of a base sequence of SEQ ID NO: 4950, and the third antisense oligomer comprises or consists of a base sequence of SEQ ID NO: 3082,
[0560] the first unit oligomer comprises or consists of a base sequence of SEQ ID NO: 1201, the second unit oligomer comprises or consists of a base sequence of SEQ ID NO: 151, the second antisense oligomer comprises or consists of a base sequence of SEQ ID NO: 4950, and the third antisense oligomer comprises or consists of a base sequence of SEQ ID NO: 3060,
[0561] the first unit oligomer comprises or consists of a base sequence of SEQ ID NO: 1201, the second unit oligomer comprises or consists of a base sequence of SEQ ID NO: 151, the second antisense oligomer comprises or consists of a base sequence of SEQ ID NO: 4950, and the third antisense oligomer comprises or consists of a base sequence of SEQ ID NO: 3065,
[0562] the first unit oligomer comprises or consists of a base sequence of SEQ ID NO: 1201, the second unit oligomer comprises or consists of a base sequence of SEQ ID NO: 151, the second antisense oligomer comprises or consists of a base sequence of SEQ ID NO: 4950, and the third antisense oligomer comprises or consists of a base sequence of SEQ ID NO: 3077,
[0563] the first unit oligomer comprises or consists of a base sequence of SEQ ID NO: 1201, the second unit oligomer comprises or consists of a base sequence of SEQ ID NO: 151, the second antisense oligomer comprises or consists of a base sequence of SEQ ID NO: 4950, and the third antisense oligomer comprises or consists of a base sequence of SEQ ID NO: 3087,
[0564] the first unit oligomer comprises or consists of a base sequence of SEQ ID NO: 1201, the second unit oligomer comprises or consists of a base sequence of SEQ ID NO: 151, the second antisense oligomer comprises or consists of a base sequence of SEQ ID NO: 4950, and the third antisense oligomer comprises or consists of a base sequence of SEQ ID NO: 3090,
[0565] the first unit oligomer comprises or consists of a base sequence of SEQ ID NO: 1201, the second unit oligomer comprises or consists of a base sequence of SEQ ID NO: 151, the second antisense oligomer comprises or consists of a base sequence of SEQ ID NO: 4950, and the third antisense oligomer comprises or consists of a base sequence of SEQ ID NO: 3096,
[0566] the first unit oligomer comprises or consists of a base sequence of SEQ ID NO: 1201, the second unit oligomer comprises or consists of a base sequence of SEQ ID NO: 151, the second antisense oligomer comprises or consists of a base sequence of SEQ ID NO: 4950, and the third antisense oligomer comprises or consists of a base sequence of SEQ ID NO: 3108,
[0567] the first unit oligomer comprises or consists of a base sequence of SEQ ID NO: 1201, the second unit oligomer comprises or consists of a base sequence of SEQ ID NO: 151, the second antisense oligomer comprises or consists of a base sequence of SEQ ID NO: 4950, and the third antisense oligomer comprises or consists of a base sequence of SEQ ID NO: 3119,
[0568] the first unit oligomer comprises or consists of a base sequence of SEQ ID NO: 1201, the second unit oligomer comprises or consists of a base sequence of SEQ ID NO: 151, the second antisense oligomer comprises or consists of a base sequence of SEQ ID NO: 4950, and the third antisense oligomer comprises or consists of a base sequence of SEQ ID NO: 3320,
[0569] the first unit oligomer comprises or consists of a base sequence of SEQ ID NO: 1201, the second unit oligomer comprises or consists of a base sequence of SEQ ID NO: 151, the second antisense oligomer comprises or consists of a base sequence of SEQ ID NO: 4698, and the third antisense oligomer comprises or consists of a base sequence of SEQ ID NO: 3082,
[0570] the first unit oligomer comprises or consists of a base sequence of SEQ ID NO: 1201, the second unit oligomer comprises or consists of a base sequence of SEQ ID NO: 151, the second antisense oligomer comprises or consists of a base sequence of SEQ ID NO: 4702, and the third antisense oligomer comprises or consists of a base sequence of SEQ ID NO: 3082,
[0571] the first unit oligomer comprises or consists of a base sequence of SEQ ID NO: 1201, the second unit oligomer comprises or consists of a base sequence of SEQ ID NO: 151, the second antisense oligomer comprises or consists of a base sequence of SEQ ID NO: 4752, and the third antisense oligomer comprises or consists of a base sequence of SEQ ID NO: 3082,
[0572] the first unit oligomer comprises or consists of a base sequence of SEQ ID NO: 1201, the second unit oligomer comprises or consists of a base sequence of SEQ ID NO: 151, the second antisense oligomer comprises or consists of a base sequence of SEQ ID NO: 4923, and the third antisense oligomer comprises or consists of a base sequence of SEQ ID NO: 3082,
[0573] the first unit oligomer comprises or consists of a base sequence of SEQ ID NO: 1201, the second unit oligomer comprises or consists of a base sequence of SEQ ID NO: 151, the second antisense oligomer comprises or consists of a base sequence of SEQ ID NO: 4926, and the third antisense oligomer comprises or consists of a base sequence of SEQ ID NO: 3082,
[0574] the first unit oligomer comprises or consists of a base sequence of SEQ ID NO: 1201, the second unit oligomer comprises or consists of a base sequence of SEQ ID NO: 151, the second antisense oligomer comprises or consists of a base sequence of SEQ ID NO: 4936, and the third antisense oligomer comprises or consists of a base sequence of SEQ ID NO: 3082,
[0575] the first unit oligomer comprises or consists of a base sequence of SEQ ID NO: 1201, the second unit oligomer comprises or consists of a base sequence of SEQ ID NO: 151, the second antisense oligomer comprises or consists of a base sequence of SEQ ID NO: 4977, and the third antisense oligomer comprises or consists of a base sequence of SEQ ID NO: 3082,
[0576] the first unit oligomer comprises or consists of a base sequence of SEQ ID NO: 1201, the second unit oligomer comprises or consists of a base sequence of SEQ ID NO: 151, the second antisense oligomer comprises or consists of a base sequence of SEQ ID NO: 4977, and the third antisense oligomer comprises or consists of a base sequence of SEQ ID NO: 3096, or
[0577] the first unit oligomer comprises or consists of a base sequence of SEQ ID NO: 1180, the second unit oligomer comprises or consists of a base sequence of SEQ ID NO: 151, the second antisense oligomer comprises or consists of a base sequence of SEQ ID NO: 4977, and the third antisense oligomer comprises or consists of a base sequence of SEQ ID NO: 3096.

[0578] In one embodiment, the first antisense oligomer comprises the first unit oligomer and the second unit oligomer from the 5′ ends in this order, the first unit oligomer comprises any one base sequence selected from SEQ ID NOs: 907 to 1602, the second unit oligomer comprises any one base sequence selected from the SEQ ID NOs: 106 to 210, the second antisense oligomer comprises any one base sequence selected from SEQ ID NOs: 4299 to 5090, and the third antisense oligomer comprises any one base sequence selected from SEQ ID NOs: 2555 to 3506. In one embodiment, the first antisense oligomer comprises the first unit oligomer and the second unit oligomer from the 5′ ends in this order, the first unit oligomer comprises a base sequence of SEQ ID NO: 1201, the second unit oligomer comprises a base sequence of SEQ ID NO: 151, the second antisense oligomer comprises a base sequence of SEQ ID NO: 4950 or 4880 (preferably 4950), and the third antisense oligomer comprises a base sequence of SEQ ID NO: 3082, 3090, or 3096.

[0579] The antisense oligomer of the present invention (including the linked-type antisense oligomer of the present invention) may be an oligonucleotide, morpholino oligomer or peptide nucleic acid (PNA) oligomer (hereinafter, also referred to as the “antisense oligonucleotide of the present invention”, the “antisense morpholino oligomer of the present invention”, or the “antisense peptide nucleic acid oligomer of the present invention”).

[0580] The antisense oligonucleotide of the present invention is an antisense oligomer composed of nucleotides as constituent units. Such nucleotides may be any of ribonucleotides, deoxyribonucleotides and modified nucleotides.

[0581] The modified nucleotide refers to one having fully or partly modified nucleobases, sugar moieties and/or phosphate-binding regions, which constitute the ribonucleotide or deoxyribonucleotide.

[0582] The nucleobase includes, for example, adenine, guanine, hypoxanthine, cytosine, thymine, uracil, and modified bases thereof. Examples of such modified bases include, but not limited to, pseudouracil, 3-methyluracil, dihydrouracil, 5-alkylcytosines (e.g., 5-methylcytosine), 5-alkyluracils (e.g., 5-ethyluracil), 5-halouracils (e.g., 5-bromouracil), 6-azapyrimidine, 6-alkylpyrimidines (e.g., 6-methyluracil), 2-thiouracil, 4-thiouracil, 4-acetylcytosine, 5-(carboxyhydroxymethyl) uracil, 5′-carboxymethylaminomethyl-2-thiouracil, 5-carboxymethylaminomethyluracil, 1-methyladenine, 1-methylhypoxanthine, 2, 2-dimethylguanine, 3-methylcytosine, 2-methyladenine, 2-methylguanine, N₆-methyladenine, 7-methylguanine, 5-methoxyaminomethyl-2-thiouracil, 5-methylaminomethyluracil, 5-methylcarbonylmethyluracil, 5-methyloxyuracil, 5-methyl-2-thiouracil, 2-methylthio-N6-isopentenyladenine, uracil-5-oxyacetic acid, 2-thiocytosine, purine, 2, 6-diaminopurine, 2-aminopurine, isoguanine, indole, imidazole, xanthine, etc.

[0583] Modification of the sugar moiety may include, for example, modifications at the 2′-position of ribose and modifications of the other positions of the sugar. The modification at the 2′-position of ribose includes a modification of replacing the 2′-OH of ribose with —OR, —R, —R′OR, —SH, —SR, —NH₂, —NHR, —NR₂, —N₃, —CN, —F, —Cl, —Br or —I, wherein R represents an alkyl or an aryl and R′ represents an alkylene.

[0584] The modification for the other positions of the sugar includes, for example, replacement of O at the 4′ position of ribose or deoxyribose with S, bridging between 2′ and 4′ positions of the sugar, e.g., LNA (locked nucleic acid) or ENA (2′-O, 4′-C-ethylene-bridged nucleic acids), but is not limited thereto.

[0585] A modification of the phosphate-binding region includes, for example, a modification of replacing phosphodiester bond with phosphorothioate bond, phosphorodithioate bond, alkyl phosphonate bond, phosphoramidate bond or boranophosphate bond (cf., e.g., Enya et al: Bioorganic & Medicinal Chemistry, 2008, 18, 9154-9160) (cf., e.g., Japan Domestic Re-Publications of PCT Application Nos. 2006/129594 and 2006/038608).

[0586] As used herein, the alkyl is preferably a straight or branched alkyl having 1 to 6 carbon atoms. Specific examples include methyl, ethyl, n-propyl, isopropyl, n-butyl, isobutyl, sec-butyl, tert-butyl, n-pentyl, isopentyl, neopentyl, tert-pentyl, n-hexyl and isohexyl. The alkyl may optionally be substituted. Examples of such substituents are a halogen, an alkoxy, cyano and nitro. The alkyl may be substituted with 1 to 3 substituents.

[0587] As used herein, the cycloalkyl is preferably a cycloalkyl having 3 to 12 carbon atoms. Specific examples include cyclopropyl, cyclobutyl, cyclopentyl, cyclohexyl, cycloheptyl, cyclooctyl, cyclodecyl and cyclododecyl.

[0588] As used herein, the halogen includes fluorine, chlorine, bromine and iodine.

[0589] As used herein, the alkoxy is a straight or branched alkoxy having 1 to 6 carbon atoms such as methoxy, ethoxy, n-propoxy, isopropoxy, n-butoxy, isobutoxy, sec-butoxy, tert-butoxy, n-pentyloxy, isopentyloxy, n-hexyloxy, isohexyloxy, etc. Among others, an alkoxy having 1 to 3 carbon atoms is preferred.

[0590] As used herein, the aryl is preferably an aryl having 6 to 10 carbon atoms. Specific examples include phenyl, α-naphthyl and β-naphthyl. Among others, phenyl is preferred. The aryl may optionally be substituted. Examples of such substituents are an alkyl, a halogen, an alkoxy, cyano and nitro. The aryl may be substituted with one to three of such substituents.

[0591] As used herein, the alkylene is preferably a straight or branched alkylene having 1 to 6 carbon atoms. Specific examples include methylene, ethylene, trimethylene, tetramethylene, pentamethylene, hexamethylene, 2-(ethyl) trimethylene and 1-(methyl) tetramethylene.

[0592] As used herein, the acyl includes a straight or branched alkanoyl or aroyl. Examples of the alkanoyl include formyl, acetyl, 2-methylacetyl, 2,2-dimethylacetyl, propionyl, butyryl, isobutyryl, pentanoyl, 2, 2-dimethylpropionyl, hexanoyl, etc. Examples of the aroyl include benzoyl, toluoyl and naphthoyl. The aroyl may optionally be substituted at substitutable positions and may be substituted with an alkyl(s).

[0593] Preferably, the antisense oligonucleotide of the present invention is the antisense oligomer of the present invention having a group represented by general formula below as a constituent unit wherein the —OH group at position 2′ of ribose is substituted with methoxy and the phosphate-binding region is a phosphorothioate bond:

[chemical structure]

wherein Base represents a nucleobase.

[0594] The antisense oligonucleotide of the present invention may be easily synthesized using various automated synthesizer (e.g., AKTA oligopilot plus 10/100 (GE Healthcare)). Alternatively, the synthesis may also be entrusted to a third-party organization (e.g., Promega Corp. or Takara Co.), etc.

[0595] The antisense morpholino oligomer of the present invention is an antisense oligomer comprising the constituent unit represented by general formula below:

[chemical structure]

wherein Base has the same significance as defined above, and,
[0596] W represents a group shown by any one of the following groups:

[chemical structure]

wherein X represents —CH₂R¹, —O—CH₂R¹, —S—CH₂R¹, —NR²R³, or F;
[0597] R¹ represents H or an alkyl;
[0598] R² and R³, which may be the same or different, each represents H, an alkyl, a cycloalkyl, or an aryl;
[0599] Y₁ represents O, S, CH₂, or NR¹;
[0600] Y₂ represents O, S, or NR¹;
[0601] Z represents O or S.

[0602] Examples of morpholino monomer compounds that are used in synthesis of the antisense morpholino oligomer of the present invention include, but not limited to, the following morpholino monomer compound (A), morpholino monomer compound (C), morpholino monomer compound (T), and morpholino monomer compound (G) shown in Table 8.

TABLE 8
Morpholino monomer compound

| | |
|---|---|
| [chemical structure] | (A) |
| [chemical structure] | (C) |
| [chemical structure] | (T) |
| [chemical structure] | (G) |

[0603] In the present invention, preferably, the morpholino oligomer is an oligomer having a group represented by general formula below as a constituent unit (phosphorodiamidate morpholino oligomer (hereinafter referred to as “PMO”)).

[chemical structure]

wherein Base, R² and R³ have the same significance as defined above.

[0604] The morpholino oligomer may be produced by the procedure described in, e.g., WO 1991/009033 or WO 2009/064471. In particular, PMO can be produced by the procedure described in WO 2009/064471 or WO2013/100190.

[0605] The antisense peptide nucleic acid oligomer of the present invention is an antisense oligomer having a group represented by general formula below as a constituent unit:

[chemical structure]

wherein Base has the same significance as defined above.

[0606] The peptide nucleic acid oligomer can be produced in accordance with, e.g., the following literatures:
[0607] 1) P. E. Nielsen, M. Egholm, R. H. Berg, O. Buchardt, Science, 254, 1497 (1991) 2) M. Egholm, O. Buchardt, P. E. Nielsen, R. H. Berg, JACS, 114, 1895 (1992) 3) K. L. Dueholm, M. Egholm, C. Behrens, L. Christensen, H. F. Hansen, T. Vulpius, K. H. Petersen, R. H. Berg, P. E. Nielsen, O. Buchardt, J. Org. Chem., 59, 5767 (1994) 4) L. Christensen, R. Fitzpatrick, B. Gildea, K. H. Petersen, H. F. Hansen, T. Koch, M. Egholm, O. Buchardt, P. E. Nielsen, J. Coull, R. H. Berg, J. Pept. Sci., 1, 175 (1995) 5) T. Koch, H. F. Hansen, P. Andersen, T. Larsen, H. G. Batz, K. Otteson, H. Orum, J. Pept. Res., 49, 80 (1997)

[0608] The antisense oligomer of the present invention (including the linked-type antisense oligomer of the present invention) may be in the form of a pharmaceutically acceptable salt thereof, in the form of a hydrate thereof, or in the form of a hydrate of the pharmaceutically acceptable salt.

[0609] Examples of the pharmaceutically acceptable salt of the antisense oligomer of the present invention are alkali metal salts such as salts of sodium, potassium and lithium; alkaline earth metal salts such as salts of calcium and magnesium; metal salts such as salts of aluminum, iron, zinc, copper, nickel, cobalt, etc.; ammonium salts; organic amine salts such as salts of t-octylamine, dibenzylamine, morpholine, glucosamine, phenylglycine alkyl ester, ethylenediamine, N-methylglucamine, guanidine, diethylamine, triethylamine, dicyclohexylamine, N,N′-dibenzylethylenediamine, chloroprocaine, procaine, diethanolamine, N-benzylphenethylamine, piperazine, tetramethylammonium, tris (hydroxymethyl) aminomethane; hydrohalide salts such as salts of hydrofluorates, hydrochlorides, hydrobromides and hydroiodides; inorganic acid salts such as nitrates, perchlorates, sulfates, phosphates, etc.; lower alkane sulfonates such as methanesulfonates, trifluoromethanesulfonates and ethanesulfonates; arylsulfonates such as benzenesulfonates and p-toluenesulfonates; organic acid salts such as acetates, malates, fumarates, succinates, citrates, tartarates, oxalates, maleates, etc.; and, amino acid salts such as salts of glycine, lysine, arginine, ornithine, glutamic acid and aspartic acid. These salts may be produced by known methods. Alternatively, the antisense oligomer of the present invention may be in the form of a hydrate thereof.

[0610] The third antisense oligomer of the present invention may have a function as a suppressor antisense oligomer. In the present invention, a suppressor antisense oligomer means an antisense oligomer which suppresses single exon skipping (hereinafter, referred to as “single skipping”). The suppressor antisense oligomer can suppress single skipping and thereby enhance an effect of multi-exon skipping by an antisense oligomer. Accordingly, a combination of the present invention comprising the third antisense oligomer may have a higher effect of multi-exon skipping as compared with one not comprising the third antisense oligomer.

[0611] Specifically, the third antisense oligomer of the present invention can suppress single skipping of any one exon selected from the group consisting of the 45th exon to the 55th exon in human dystrophin pre-mRNA. More specifically, the third antisense oligomer of the present invention can suppress single skipping of the 45th exon in human dystrophin pre-mRNA.

[0612] The third antisense oligomer of the present invention can suppress single skipping by, for example, targeting the site of a splicing silencer sequence, a branch site sequence, or a splice site sequence in human dystrophin pre-mRNA and inhibiting splicing. The third antisense oligomer of the present invention reduces the efficiency of single skipping of an intended exon as compared with a control.

[0613] In one embodiment, the third antisense oligomer of the present invention targets a recognition sequence of heterogeneous nuclear ribonucleoprotein A1 (hnRNP A1) that is a splicing silencer sequence. A splicing silencer sequence refers to a base sequence element that functions to suppress recognition of an exon in pre-mRNA. A target sequence of the third antisense oligomer has been herein described.

[0614] Whether the suppressor antisense oligomer enhances a multi-exon skipping effect or not can be confirmed by providing (i) an experimental system for multi-exon skipping using only the antisense oligomer of the present invention alone and (ii) an experimental system for multi-exon skipping using the antisense oligomer and the suppressor antisense oligomer of the present invention such that the other conditions are the same therebetween, and observing the difference between a multi-exon skipping effect obtained in the experimental system (ii) and a multi-exon skipping effect obtained in the experimental system (i).

### Method for Producing PMO

[0615] The antisense oligomer of the present invention may be PMO. An aspect of PMO is, for example, the compound represented by general formula (I) below (hereinafter, referred to as PMO (I)).

[chemical structure]

wherein Base, R² and R³ have the same significance as defined above; and,
[0616] n is a given integer of 1 to 99, preferably a given integer of 18 to 28.

[0617] PMO (I) can be produced in accordance with a known method (cf., e.g., WO2009/064471 or WO2013/100190).

[0618] In the antisense oligomer of the present invention, the 5′ end may be a group represented by any of chemical structures (1) to (3) below, and preferably is (3)-OH.

[chemical structure]

[0619] Hereinafter, the groups shown by (1), (2) and (3) above are referred to as “Group (1),” “Group (2)” and “Group (3),” respectively.

[0620] The antisense oligomer of the present invention may be in the form of a complex formed together with a functional peptide for purpose of improving effectiveness (for example, a cell-penetrating peptide for purpose of improving transport efficiency to a target cell) or an antibody fragment (for example, a Fab of an antibody to a muscle cell specific receptor such as a transferrin receptor) (International Publications WO2008/036127, WO2009/005793, WO2012/150960, WO2016/187425, WO2018/118662, WO2011/013700, WO2018/118599, and WO2018/118627, Japanese Patent Laid-Open No. 2022-47613, J. D. Ramsey, N. H. Flynn, Pharmacology & Therapeutics 154, 78-86 (2015), M. K. Tsoumpra et al., EBioMedicine, 45, 630-645 (2019), International Publications WO2020/028832, WO2021/142307, WO2021/142313, WO2022/020107, and WO2022/020108). A binding site is not especially limited, and it is preferable that the 5′ end or the 3′ end of the antisense oligomer is bonded to the amino terminal or carboxyl terminal of a functional peptide or an antibody fragment.

[0621] In another aspect, the antisense oligomer of the present invention and a functional peptide or an antibody fragment may form a complex via a linker. The linker is not especially limited, and it is preferable that the 5′ end or the 3′ end of the antisense oligomer is bonded to one end of the linker, and that the amino terminal or the carboxyl terminal of the functional peptide or the antibody fragment is bounded to the other end of the linker. An additional amino acid may be present between the functional peptide or the antibody fragment and the linker.

### Medical Use

[0622] In one embodiment, the present invention provides a pharmaceutical composition comprising the first antisense oligomer and the second antisense oligomer of the present invention (also including a pharmaceutically acceptable salt thereof, or a hydrate thereof) (hereinafter, also referred to as the “pharmaceutical composition of the present invention”). The pharmaceutical composition of the present invention may further comprise the third antisense oligomer of the present invention (also including a pharmaceutically acceptable salt thereof, or a hydrate thereof) and/or a pharmaceutically acceptable carrier.

[0623] In one embodiment, the present invention provides a pharmaceutical combination of a pharmaceutical composition comprising the first antisense oligomer of the present invention and a pharmaceutical composition comprising the second antisense oligomer of the present invention (hereinafter, also referred to as the “pharmaceutical combination of the present invention”). The pharmaceutical combination of the present invention may further comprise the third antisense oligomer and/or a pharmaceutically acceptable carrier.

[0624] The pharmaceutical composition of the present invention comprises any combination of the antisense oligomers of the present invention. The pharmaceutical combination of the present invention also comprises any combination of the antisense oligomers of the present invention. Details of the combinations of the antisense oligomers are as described herein.

[0625] In one embodiment, the antisense oligomers in the combination of the present invention are comprised in one pharmaceutical composition to be simultaneously administered. In another embodiment, the antisense oligomers in the combination of the present invention are comprised in a plurality of pharmaceutical compositions (pharmaceutical combination of the present invention) to be separately (simultaneously or sequentially) administered. As used herein, the term “simultaneously” administering a plurality of pharmaceutical compositions means that a plurality of pharmaceutical compositions are administered at the same time. As used herein, the term “sequentially” administering a plurality of pharmaceutical compositions means that these are administered at different times. Specifically, one pharmaceutical composition may be administered before or after another pharmaceutical composition, and an administration interval in this case is not limited, but may be, for example, a few minutes, a few hours, or a few days.

[0626] The pharmaceutical composition of the present invention and the pharmaceutical combination of the present invention can each be used for the treatment of, for example, Duchenne muscular dystrophy, Becker muscular dystrophy, limb-girdle muscular dystrophy (LGMD), congenital muscular dystrophy, Emery-Dreifuss muscular dystrophy, facioscapulohumeral muscular dystrophy, oculopharyngeal muscular dystrophy, cerebral autosomal dominant arteriopathy with subcortical infarct and leukoencephalopathy (CADASIL), and Alport's syndrome. The pharmaceutical combination of the present invention and the pharmaceutical composition of the present invention can each be administered to a human patient and in particular, a human patient with muscular dystrophy. The patient to receive the pharmaceutical combination of the present invention or the pharmaceutical composition of the present invention may be a human patient having a mutation that is the target of skipping of two or more exons selected from the group consisting of exons 45 to 55 in the dystrophin gene. Herein, the mutation that is the target of exon skipping is not limited, and an example includes a patient having deletion of exon (for example, having deletion of exon 46, exon 46 to 47, exon 46 to 48, exon 46 to 50, exon 46 to 51, exon 46 to 52, exon 46 to 53, exon 46 to 55, exon 47 to 50, exon 47 to 52, exon 48 to 50, exon 48 to 52, exon 48 to 54, exon 49 to 50, exon 49 to 52, exon 49 to 54, exon 50, exon 50 to 52, exon 51, exon 51 to 53, exon 52, exon 53, or exon 53 to 54) in the dystrophin gene.

[0627] One aspect of the present invention provides a method for treatment of muscular dystrophy, which comprises administering to a patient with muscular dystrophy a combination of the antisense oligomer of the present invention. Another aspect of the present invention provides a method for treatment of muscular dystrophy, which comprises administering to a patient with muscular dystrophy the pharmaceutical composition of the present invention or the pharmaceutical combination of the present invention.

[0628] The method for treatment may involve performing skipping of any two or more numerically consecutive exons selected from the group consisting of the 45th exon to the 55th exon in human dystrophin pre-mRNA. In the method for treatment, the patient with muscular dystrophy may be a patient having a mutation that is the target of exon 45 to 55 skipping in the dystrophin gene. The patient may be a human and may be a human patient having a mutation that is the target of exon 45 to 55 skipping in the dystrophin gene.

[0629] The present invention further provides use of a combination of the antisense oligomer of the present invention, or the pharmaceutical composition of the present invention or the pharmaceutical combination of the present invention in manufacturing of a medicament for the treatment of muscular dystrophy.

[0630] The present invention further provides a combination of the antisense oligomer of the present invention, or the pharmaceutical composition of the present invention or the pharmaceutical combination of the present invention for use in the treatment of muscular dystrophy. The treatment may involve performing skipping of any two or more numerically consecutive exons selected from the group consisting of the 45th exon to the 55th exon in human dystrophin pre-mRNA. In the treatment, the patient with muscular dystrophy may be a patient having a mutation that is the target of exon 45 to 55 skipping in the dystrophin gene. The patient may be a human and may be a human patient having a mutation that is the target of exon 45 to 55 skipping in the dystrophin gene.

[0631] Administration route for the combination of the antisense oligomer of the present invention, or the pharmaceutical composition of the present invention or the pharmaceutical combination of the present invention is not particularly limited so long as it is pharmaceutically acceptable route for administration, and can be chosen depending upon method of treatment. In view of easiness in delivery to muscle tissues, preferred are intravenous administration, intraarterial administration, intramuscular administration, subcutaneous administration, oral administration, tissue administration, transdermal administration, etc. Also, dosage forms which are available for the composition of the present invention are not particularly limited, and include, for example, various injections, oral agents, drips, inhalations, ointments, lotions, etc.

[0632] In administration of the antisense oligomer of the present invention to patients with muscular dystrophy, preferably, the composition of the present invention contains a carrier to promote delivery of the oligomer to muscle tissues. Such a carrier is not particularly limited as far as it is pharmaceutically acceptable, and examples include cationic carriers such as cationic liposomes, cationic polymers, etc., or carriers using viral envelope. The cationic liposomes are, for example, liposomes composed of 2-O-(2-diethylaminoethyl) carabamoyl-1, 3-O-dioleoylglycerol and phospholipids as the essential constituents (hereinafter referred to as “liposome A”), Oligofectamine (registered trademark) (manufactured by Invitrogen Corp.), Lipofectin (registered trademark) (manufactured by Invitrogen Corp.), Lipofectamine (registered trademark) (manufactured by Invitrogen Corp.), Lipofectamine 2000 (registered trademark) (manufactured by Invitrogen Corp.), DMRIE-C (registered trademark) (manufactured by Invitrogen Corp.), GeneSilencer (registered trademark) (manufactured by Gene Therapy Systems), TransMessenger (registered trademark) (manufactured by QIAGEN, Inc.), TransIT TKO (registered trademark) (manufactured by Mirus) and Nucleofector II (Lonza). Among others, liposome A is preferred. Examples of cationic polymers are JetSI (registered trademark) (manufactured by Qbiogene, Inc.) and Jet-PEI (registered trademark) (polyethylenimine, manufactured by Qbiogene, Inc.). An example of carriers using viral envelop is GenomeOne (registered trademark) (HVJ-E liposome, manufactured by Ishihara Sangyo). Alternatively, the medical devices described in Japanese Patent Nos. 2924179 and the cationic carriers described in Japanese Domestic Re-Publication PCT Nos. 2006/129594 and 2008/096690 may be used as well.

[0633] A concentration of the antisense oligomer of the present invention contained in the pharmaceutical composition of the present invention and/or the pharmaceutical combination of the present invention may vary depending on kind of the carrier, etc., and is appropriately in a range of 0.1 nM to 100 μM, preferably in a range of 1 nM to 10 μM, and more preferably in a range of 10 nM to 1 μM. A weight ratio of the antisense oligomer of the present invention contained in the composition of the present invention and the carrier (carrier/antisense oligomer of the present invention) may vary depending on property of the oligomer, type of the carrier, etc., and is appropriately in a range of 0.1 to 100, preferably in a range of 1 to 50, and more preferably in a range of 10 to 20.

[0634] In one embodiment, the antisense oligomers in the combination of the present invention are comprised in one pharmaceutical composition to be simultaneously administered. In another embodiment, the antisense oligomers in the combination of the present invention are comprised in a plurality of pharmaceutical compositions (pharmaceutical combination of the present invention) to be separately (simultaneously or sequentially) administered. When the antisense oligomers in the combination of the present invention are comprised in one or a plurality of pharmaceutical compositions, concentrations of the antisense oligomers are as follows.

[0635] The pharmaceutical composition of the present invention and/or the pharmaceutical combination of the present invention may be in the form of an aqueous solution. In this case, the pharmaceutical composition of the present invention and/or the pharmaceutical combination of the present invention may comprise the antisense oligomer of the present invention in a concentration of 2.5 to 500 mg/mL, 5 to 450 mg/mL, 10 to 400 mg/mL, 15 to 350 mg/mL, 20 to 300 mg/mL, 20 to 250 mg/mL, 20 to 200 mg/mL, 20 to 150 mg/mL, 20 to 100 mg/mL, 20 to 50 mg/mL, 20 to 40 mg/mL, 20 to 30 mg/mL, 23 to 27 mg/mL, 24 to 26 mg/mL, or 25 mg/mL. The pharmaceutical composition of the present invention and/or the pharmaceutical combination of the present invention may comprise the antisense oligomer of the present invention in a concentration of 10 to 100 mg/mL, 15 to 95 mg/mL, 20 to 80 mg/mL, 25 to 75 mg/mL, 30 to 70 mg/mL, 35 to 65 mg/mL, 40 to 60 mg/mL, 45 to 55 mg/mL, 47 to 53 mg/mL, 48 to 52 mg/mL, 49 to 51 mg/mL, or 50 mg/mL.

[0636] The pharmaceutical composition of the present invention and/or the pharmaceutical combination of the present invention may be in a dry form. In this case, in order to prepare the pharmaceutical composition of the present invention and/or the pharmaceutical combination of the present invention in an aqueous solution form, for example, 125 mg or 250 mg of the antisense oligomer of the present invention in a dry form may be mixed with 0.5 mL to 100 ml of water (which corresponds to a concentration of 1.25 mg/mL to 250 mg/mL or 2.5 mg/mL to 500 mg/mL of the antisense oligomer of the present invention), preferably with 1 mL to 50 mL of water (which corresponds to a concentration of 2.5 mg/mL to 125 mg/mL or 5 mg/mL to 250 mg/mL of the antisense oligomer of the present invention), more preferably with 5 mL to 10 mL of water (which corresponds to a concentration of 12.5 mg/mL to 25 mg/mL or 25 mg/mL to 50 mg/mL of the antisense oligomer of the present invention) for use.

[0637] When the antisense oligomers in the combination of the present invention are comprised in one or a plurality of pharmaceutical compositions, a total concentration of the antisense oligomers is as follows.

[0638] When the pharmaceutical composition of the present invention and/or the pharmaceutical combination of the present invention is in an aqueous solution form, the pharmaceutical composition of the present invention and/or the pharmaceutical combination of the present invention may comprise the antisense oligomers of the present invention in a total concentration of 2.5 to 500 mg/mL, 5 to 450 mg/mL, 10 to 400 mg/mL, 15 to 350 mg/mL, 20 to 300 mg/mL, 20 to 250 mg/mL, 20 to 200 mg/mL, 20 to 150 mg/mL, 20 to 100 mg/mL, 20 to 50 mg/mL, 20 to 40 mg/mL, 20 to 30 mg/mL, 23 to 27 mg/mL, 24 to 26 mg/mL, or 25 mg/mL, or 5 to 1000 mg/mL, 10 to 900 mg/mL, 20 to 800 mg/mL, 30 to 700 mg/mL, 40 to 600 mg/mL, 40 to 500 mg/mL, 40 to 400 mg/mL, 40 to 300 mg/mL, 40 to 200 mg/mL, 40 to 100 mg/mL, 40 to 80 mg/mL, 40 to 60 mg/mL, 46 to 54 mg/mL, 48 to 52 mg/mL, or 50 mg/mL, or 7.5 to 1500 mg/mL, 15 to 1350 mg/mL, 30 to 1200 mg/mL, 45 to 1150 mg/mL, 60 to 900 mg/mL, 60 to 750 mg/mL, 60 to 600 mg/mL, 60 to 450 mg/mL, 60 to 300 mg/mL, 60 to 150 mg/mL, 60 to 120 mg/mL, 60 to 90 mg/mL, 69 to 81 mg/mL, 72 to 78 mg/mL, or 75 mg/mL. Alternatively, the pharmaceutical composition of the present invention and/or the pharmaceutical combination of the present invention may comprise the antisense oligomers of the present invention in a total concentration of 10 to 100 mg/mL, 15 to 95 mg/mL, 20 to 80 mg/mL, 25 to 75 mg/mL, 30 to 70 mg/mL, 35 to 65 mg/mL, 40 to 60 mg/mL, 45 to 55 mg/mL, 47 to 53 mg/mL, 48 to 52 mg/mL, 49 to 51 mg/mL, or 50 mg/mL, or 20 to 200 mg/mL, 30 to 190 mg/mL, 40 to 160 mg/mL, 50 to 150 mg/mL, 60 to 140 mg/mL, 70 to 130 mg/mL, 80 to 120 mg/mL, 90 to 110 mg/mL, 94 to 106 mg/mL, 96 to 104 mg/mL, 98 to 102 mg/mL, or 100 mg/mL, or 30 to 300 mg/mL, 45 to 285 mg/mL, 60 to 240 mg/mL, 75 to 225 mg/mL, 90 to 210 mg/mL, 105 to 195 mg/mL, 120 to 180 mg/mL, 130 to 165 mg/mL, 141 to 159 mg/mL, 144 to 156 mg/mL, 147 to 153 mg/mL, or 150 mg/mL.

[0639] When the pharmaceutical composition of the present invention and/or the pharmaceutical combination of the present invention is in a dry form, in order to prepare the pharmaceutical composition of the present invention and/or the pharmaceutical combination of the present invention in an aqueous solution form, for example, 125 mg or 250 mg of the antisense oligomer of the present invention in a dry form may be mixed with 0.5 mL to 100 mL of water (which corresponds to a total concentration of 1.25 mg/mL to 250 mg/mL or 2.5 mg/mL to 500 mg/mL of the antisense oligomers of the present invention), preferably with 1 mL to 50 ml of water (which corresponds to a total concentration of 2.5 mg/mL to 125 mg/mL or 5 mg/mL to 250 mg/mL of the antisense oligomers of the present invention), more preferably with 5 mL to 10 mL of water (which correspond to a total concentration of 12.5 mg/mL to 25 mg/mL or 25 mg/mL to 50 mg/mL of the antisense oligomers of the present invention), or for example, 250 mg or 500 mg in total of the antisense oligomers of the present invention in a dry form may be mixed with 0.5 mL to 100 ml of water (which corresponds to a total concentration of 2.5 mg/mL to 500 mg/mL or 5 mg/mL to 1000 mg/mL of the antisense oligomers of the present invention), preferably with 1 mL to 50 mL of water (which corresponds to a total concentration of 5 mg/mL to 250 mg/mL or 10 mg/mL to 500 mg/mL of the antisense oligomers of the present invention), more preferably with 5 mL to 10 mL of water (which correspond to a total concentration of 25 mg/mL to 50 mg/mL or 50 mg/mL to 100 mg/mL of the antisense oligomers of the present invention), or for example, 375 mg or 750 mg in total of the antisense oligomers of the present invention in a dry form may be mixed with 0.5 mL to 100 ml of water (which corresponds to a total concentration of 3.75 mg/mL to 750 mg/mL or 7.5 mg/mL to 150 mg/mL of the antisense oligomers of the present invention), preferably with 1 mL to 50 mL of water (which corresponds to a total concentration of 7.5 mg/mL to 375 mg/mL or 15 mg/mL to 750 mg/mL of the antisense oligomers of the present invention), more preferably with 5 mL to 10 ml of water (which corresponds to a total concentration of 37.5 mg/mL to 75 mg/mL or 75 mg/mL to 150 mg/mL of the antisense oligomers of the present invention) for use.

[0640] In addition to the antisense oligomer of the present invention and the carrier described above, pharmaceutically acceptable additives may also be optionally formulated in the pharmaceutical composition of the present invention and/or the pharmaceutical combination of the present invention. Examples of such additives are emulsification aids (e.g., fatty acids having 6 to 22 carbon atoms and their pharmaceutically acceptable salts, albumin and dextran), stabilizers (e.g., cholesterol, phosphatidic acid, mannitol, and sorbitol), isotonizing agents (e.g., sodium chloride, glucose, maltose, lactose, sucrose, and trehalose), and pH controlling agents (e.g., hydrochloric acid, sulfuric acid, phosphoric acid, acetic acid, sodium hydroxide, potassium hydroxide and triethanolamine). One or more of these additives can be used. The content of the additive in the composition of the present invention is appropriately 90 wt % or less, preferably 70 wt % or less and more preferably, 50 wt % or less.

[0641] The pharmaceutical composition of the present invention and/or the pharmaceutical combination of the present invention can be prepared by adding the antisense oligomer of the present invention to a carrier dispersion and adequately stirring the mixture. Additives may be added at an appropriate step either before or after addition of the antisense oligomer of the present invention. An aqueous solvent that can be used in adding the antisense oligomer of the present invention is not particularly limited as far as it is pharmaceutically acceptable, and examples are injectable water or injectable distilled water, electrolyte fluid such as physiological saline, etc., and sugar fluid such as glucose fluid, maltose fluid, etc. A person skilled in the art can appropriately choose conditions for pH and temperature for such matter.

[0642] The pharmaceutical composition of the present invention and/or the pharmaceutical combination of the present invention may be prepared into, e.g., a liquid form and its lyophilized preparation. The lyophilized preparation can be prepared by lyophilizing the composition of the present invention in a liquid form in a conventional manner. The lyophilization can be performed, for example, by appropriately sterilizing the composition of the present invention in a liquid form, dispensing an aliquot into a vial container, performing preliminary freezing for 2 hours at conditions in a range of about −40° C. to −20° C., performing a primary drying in a range of about 0° C. to 10° C. under reduced pressure, and then performing a secondary drying in a range of about 15° C. to 25° C. under reduced pressure. In general, the lyophilized preparation of the composition of the present invention can be obtained by replacing the content of the vial with nitrogen gas and capping.

[0643] The lyophilized preparation of the pharmaceutical composition of the present invention and/or the pharmaceutical combination of the present invention can be used in general upon reconstitution by adding an optional suitable solution (reconstitution liquid) and redissolving the preparation. Such a reconstitution liquid includes injectable water, physiological saline and other infusion fluids. A volume of the reconstitution liquid may vary depending on the intended use, etc., is not particularly limited, and is suitably 0.5-fold to 2-fold greater than the volume prior to lyophilization or no more than 500 mL.

[0644] It is desired to control a dose of the pharmaceutical composition of the present invention and/or the pharmaceutical combination of the present invention to be administered, by taking the following factors into account: the type and dosage form of the antisense oligomer of the present invention contained; patients' conditions including age, body weight, etc.; administration route; and the characteristics and extent of the disease. A single dose calculated as the amount of the antisense oligomer of the present invention can be 0.1 mg to 1 g per kg body weight, preferably 1 mg to 100 mg per kg body weight, more preferably 1 mg to 90 mg per kg body weight, and further preferably 1 mg to 80 mg per kg body weight. The frequency of administration may be once per 1 to 3 days, once per week, or once per 2 to 3 weeks. This numerical range may vary occasionally depending on type of the target disease, administration route and target molecule. Therefore, a dose or frequency of administration lower than the range may be sufficient in some occasion and conversely, a dose or frequency of administration higher than the range may be required occasionally.

[0645] In still another aspect of the pharmaceutical composition of the present invention and/or the pharmaceutical combination of the present invention, there is provided a pharmaceutical composition comprising a vector capable of expressing the antisense oligomer of the present invention and the carrier described above. Such an expression vector may be a vector capable of expressing a plurality of the antisense oligomers of the present invention of the present invention. The composition may be formulated with pharmaceutically acceptable additives as in the case with the composition of the present invention containing the antisense oligomer of the present invention. A concentration of the expression vector contained in the composition may vary depending upon type of the career, etc., and is appropriately in a range of 0.1 nM to 100 μM, preferably in a range of 1 nM to 10 μM, and more preferably in a range of 10 nM to 1 μM. A weight ratio of the expression vector contained in the composition and the carrier (carrier/expression vector) may vary depending on property of the expression vector, type of the carrier, etc., and is appropriately in a range of 0.1 to 100, preferably in a range of 1 to 50, and more preferably in a range of 10 to 20. The content of the carrier contained in the composition is the same as in the case with the composition of the present invention containing the antisense oligomer of the present invention, and a method for producing the same is also the same as in the case with the composition of the present invention.

### EXAMPLES

[0646] Hereinafter, the present invention will be described in more detail with reference to Examples and Test Examples below, but is not limited thereto.

### Example 1: Production of Antisense Oligomers

[0647] In accordance with the method described in Example 1 of International Publication WO2013/100190, antisense oligomers shown in Table 9 (PMO Nos. 1 to 5 (SEQ ID NOS: 5098 to 5102)) were synthesized. Theoretical values and actual values measured by ESI-TOF-MS of the molecular weights of the antisense oligomers are also shown. The 5′ end of each PMO is Group (1) below. The synthesized PMO was dissolved in water for injection (manufactured by Otsuka Pharmaceutical Factory, Inc.).

TABLE 9

| | SEQ | | | Molecular weight | |
|---|---|---|---|---|---|
| PMO | ID | Target base | | Theoretical | Actual |
| No. | NO: | sequence | Base sequence of PMO | value | value |
| 1 | 5098 | M45_(−66)- | TGACAACAGCTTGACGCTGCCCGTT | 9247.21 | 9247.66 |
| | | (−61)_19-40 | TAA | | |
| 2 | 5099 | M55_(−4)-24 | AAAGCAGCCTCTTGCTCACTTACTC | 9158.18 | 9158.3 |
| | | | TGC | | |
| 3 | 5100 | M45_183-206 | AGCTCTGCTAAAAAGTCTCTGTCA | 7906.75 | 7906.12 |
| 4 | 5101 | M45_197-220 | TTAAAGGATAGTGTAGCTCTGCTA | 8001.77 | 8001.77 |
| 5 | 5102 | M45_191-214 | GATAGTGTAGCTCTGCTAAAAAGT | 8010.78 | 8010.48 |

[chemical structure]

[0648] The target base sequence of the antisense oligomer of the present invention was described as “Ma₁_b₁-C₁”, “Ma₂_b₂-C₂_Ma₃_b₃-C₃”.

[0649] “Ma₁ ” represents the ath exon of the mouse dystrophin gene, “b₁” represents the 5′-terminal base of the target base sequence, and “C₁” represents the 3′-terminal base of the target base sequence.

[0650] When “b₁” and “C₁” are positive integers, “b₁” and “C₁” each represent a base number in the downstream direction when the 5′-terminal base of the ath exon is counted as the 1st base. On the other hand, when “b₁” and “C₁” are negative numbers, “b₁” and “C₁” each represent a base number in the upstream direction when the 3′-terminal base of the (a-1) th intron is counted as the 1st base.

[0651] For example, “M55_(-4)-24” means a base sequence in which the 5′ end of the target base sequence is the 4th base in the upstream direction from the 3′ end of the 54th intron and the 3′ end of the target base sequence is the 24th base in the downstream direction from the 5′ end of the 55th exon.

[0652] “Ma₂_b₂-C₂” which is the first part of “Ma₂_b₂-C₂_Ma₃ b₃-C₃” means the target base sequence of a 3′ unit oligomer constituting the antisense oligomer, and the second part “Ma₃_b₃-C₃” means the target base sequence of a 5′ unit oligomer constituting the antisense oligomer.

[0653] When “Ma₂” and “Ma₃” are the same, the “_Ma₃” part may be omitted.

[0654] For example, “M45_(-66)-(-61)_19-40” or “M45_(-66)-(-61)_M45_19-40” means a base sequence in which the target base sequence of the 3′ unit oligomer constituting the antisense oligomer is “M45_(-66)-(-61)” and the target base sequence of the 5′ unit oligomer constituting the antisense oligomer is “M45_19-40”.

### Example 2: Test on Multi-Exon Skipping Activity of Antisense Oligomer

### Test Example 1

### Assay of Exon 45 to 55 Multi-Exon Skipping in Model Mouse-Derived Cultured Cells-(1): Induction of Multi-Exon Skipping (Total Addition Concentration: 30 μM)

### Procedures

[0655] H2K-mdx52 cells (immortalized myoblasts established from a crossbred individual of a mdx52 mouse, that is, Duchenne muscular dystrophy model, and a H-2 kb-tsA58 transgenic mouse) were seeded in a 0.4% Gelatine-coated 48-well plate (manufactured by AGC Techno Glass Co., Ltd.) at 1×10⁴/well, and were cultured for 3 days under conditions of 37° C. and 5% CO₂ in 0.5 mL of a growth medium (High glucose Dulbecco's Modified Eagle Medium (DMEM) (containing GlutaMax) (manufactured by Thermo Fisher Scientific) supplemented with 20% FBS (manufactured by Sigma Aldrich), 2% chick embryo extract (manufactured by US Biological, hereinafter the same), 2% L-glutamine (manufactured by Sigma Aldrich, hereinafter the same), 1% penicillin/streptomycin (manufactured by Sigma Aldrich, hereinafter the same), and 20 U/mL Recombinant Murine IFN-γ (manufactured by PeproTech)). After 48 hours, the growth medium was changed to a differentiation medium (DMEM supplemented with 5% horse serum (manufactured by Thermo Fisher Scientific), 2% L-glutamine, and 1% penicillin/streptomycin). After culturing for 3 days, transfection was performed with 30 UM PMO using 6 μM Endo-Porter (manufactured by Gene Tools, hereinafter the same). PMOs used here are shown in Table 10.

TABLE 10

| | | SEQ |
|---|---|---|
| PMO No. | Base sequence of PMO (5′ to 3′) | ID NO: |
| 1 | TGACAACAGCTTGACGCTGCCCGTTTAA | 5098 |
| 2 | AAAGCAGCCTCTTGCTCACTTACTCTGC | 5099 |
| 3 | AGCTCTGCTAAAAAGTCTCTGTCA | 5100 |

[0656] After culturing for another 3 days, the resultant cells were washed once with PBS (manufactured by Takara Bio Inc.), and then, the total RNA was extracted with RNeasy Mini Kit (manufactured by Qiagen K. K.). 350 μL of Buffer RLT (manufactured by Qiagen K. K.) containing 1%2-mercaptoethanol (manufactured by Nacalai Tesque, Inc.) was added to the cells, and after the cells were allowed to stand at room temperature for a few minutes to lyse the cells, the lysate was collected into a QIAshredder homogenizer (manufactured by Qiagen K. K.). A homogenate was produced by centrifugation at 15,000 rpm for 2 minutes. The total RNA was extracted according to the protocol attached to RNeasy Mini Kit (manufactured by Qiagen K. K.). The concentration of the total RNA extracted was determined using a NanoDrop One C (manufactured by Thermo Fisher Scientific). One-Step RT-PCR was performed with 400 ng of the extracted total RNA using a QIAGEN One Step RT-PCR Kit (manufactured by Qiagen K. K.). A reaction solution was prepared in accordance with the protocol attached to the kit. Veriti 96 Well Thermal Cycler (manufactured by Thermo Fisher Scientific) was used as the thermal cycler. The RT-PCR program used was as follows.
[0657] 50° C., 30 mins: reverse transcription reaction
[0658] 95° C., 15 mins: polymerization activation, reverse transcriptase inactivation, CDNA thermal denaturation
[0659] [94° C., 10 seconds; 57° C., 30 seconds; 72° C., 1 minute]×33 cycles: PCR amplification
[0660] 72° C., 10 mins: final extension

[0661] The base sequences of the forward primer and reverse primer used for RT-PCR are given below.

Forward primer:
(SEQ ID NO: 5103)
5′-cagttgaaaaatggcgacac-3′
Reverse primer 1:
(SEQ ID NO: 5104)
5′-ttagctgctgctcatctcca-3′
Reverse primer 2:
(SEQ ID NO: 5105)
5′-ttccagggatctcaggattt-3′

[0662] Transcripts (429 bp) having no skipping and transcripts (253 bp) having single exon skipping of exon 45 can be detected by a combination of the forward primer and the reverse primer 1, and transcripts (218 bp) having multi-exon skipping of exons 45 to 55 can be detected by a combination of the forward primer and the reverse primer 2.

[0663] The reaction product of the PCR above was analyzed using MultiNA (manufactured by Shimadzu Corp.).

[0664] The polynucleotide level “A” of the band with skipping of exons 45 to 55, the polynucleotide level “B” of the band with skipping of exon 45, and the polynucleotide level “C” of the band having no skipping were measured. Based on these measurement values of “A”, “B”, and “C”, the skipping efficiencies of exon 45 to 55 skipping and exon 45 skipping were determined by the following equations:

$$Skipping efficiency of exon 45 to 55 skipping ( \% ) = A / ( A + B + C ) \times 100$$

$$Skipping efficiency of exon 45 skipping ( \% ) = B / ( A + B + C ) \times 100$$

### Results

[0665] The results are shown in FIGS. 1 to 2.

[0666] As compared with the mixture of PMO No. 1 and PMO No. 2 (15 μM each, Mixture 2) used singly, the mixture additionally containing PMO No. 3 targeting hnRNP A1 (10 UM each, Mixture 2+PMO No. 3) increased the skipping efficiency of exon 45 to 55 skipping (FIG. 1), and reduced the skipping efficiency of exon 45 skipping (FIG. 2).

### Test Example 2

### Assay of Exon 45 to 55 Multi-Exon Skipping in Model Mouse-Derived Cultured Cells-(2): Induction of Multi-Exon Skipping (Total Addition Concentration: 15 μM, Mixing Ratio Changed)

### Procedures

[0667] H2K-mdx52 cells were seeded in a 0.4% Gelatine-coated 24-well plate at 5×10⁴/well and cultured for 48 hours under conditions of 37° C. and 5% CO₂ in 1 mL of a growth medium, and then the growth medium was changed to a differentiation medium. After culturing for 3 days, transfection was performed with 15 μM PMO using 6 μM Endo-Porter.

[0668] A PMO shown in Table 11 was used in addition to those used in Test Example 1.

TABLE 11

| | | SEQ |
|---|---|---|
| PMO No. | Base sequence of PMO (5′ to 3′) | ID NO: |
| 4 | TTAAAGGATAGTGTAGCTCTGCTA | 5101 |

[0669] After culturing for another 3 days, the resultant cells were collected in the same manner as in Test Example 1, the total RNA was extracted, and subjected to One-Step RT-PCR, and the reaction product of the PCR thus obtained was analyzed to obtain the skipping efficiencies of exon 45 to 55 skipping and exon 45 skipping.

### Results

[0670] The results are shown in FIGS. 3 to 8.

[0671] As compared with the mixture of PMO No. 1 and PMO No. 2 (Mixture 2) used singly, the mixture additionally containing PMO No. 3 targeting hnRNP A1 (Mixture 2+hnRNP A1) increased the skipping efficiency of exon 45 to 55 skipping (FIG. 3), and reduced the skipping efficiency of exon 45 skipping (FIG. 4).

[0672] The mixture of Mixture 2 and PMO No. 4 targeting hnRNP A1 (Mixture 2+PMO No. 4) caused exon 45 to 55 skipping (FIG. 5), and reduced the skipping efficiency of exon 45 skipping (FIG. 6).

[0673] As a result of studying the case where the ratio between Mixture 2 and PMO No. 3 targeting hnRNP A1 was changed, when these were formulated at 3:1, the skipping efficiency of exon 45 to 55 skipping was the highest (FIG. 7), and the skipping efficiency of exon 45 skipping was most largely suppressed (FIG. 8).

### Test Example 3

### Assay of Exon 45 to 55 Multi-Exon Skipping in Model Mouse-Derived Cultured Cells-(3): Induction of Multi-Exon Skipping (Total Addition Concentration: 50 μM)

### Procedures

[0674] H2K-mdx52 cells were seeded in a 0.4% Gelatine-coated 24-well plate at 6.7×10⁴/well and cultured for 1 day under conditions of 37° C. and 5% CO₂ in 2 mL of a growth medium. After culturing for 2 days, the growth medium was changed to a differentiation medium. After culturing for 3 days, transfection was performed with 50 UM PMO using 6 μM Endo-Porter. After culturing for another 3 days, the resultant cells were collected in the same manner as in Test Example 1, the total RNA was extracted, and subjected to One-Step RT-PCR, and the reaction product of the PCR thus obtained was analyzed to obtain skipping efficiencies of exon 45 to 55 skipping and exon 45 skipping.

### Results

[0675] The results are shown in FIGS. 9 and 10.

[0676] As compared with the mixture of PMO No. 1 and PMO No. 2 (Mix 2) used singly, the mixture additionally containing PMO No. 3 targeting hnRNP A1 (Mix 2+hnRNP A1) increased the skipping efficiency of exon 45 to 55 skipping (FIG. 9), and reduced the skipping efficiency of exon 45 skipping (FIG. 10). Mix 2 had the same definition as Mixture 2 used in Test Example 1 and Test Example 2.

### Test Example 4

### Assay of Exon 45 to 55 Multi-Exon Skipping in Model Mouse-Derived Cultured Cells-(4): Restoration of Dystrophin Protein by Multi-Exon Skipping

### Procedures

[0677] H2K-mdx52 cells were seeded in a 0.4% Gelatine-coated 24-well plate at 6.7×10⁴/well and cultured for 1 day under conditions of 37° C. and 5% CO₂ in 2 mL of a growth medium. After culturing for 2 days, the growth medium was changed to a differentiation medium. After culturing for 3 days, transfection was performed with 50 UM PMO using 6 μM Endo-Porter. After culturing for another 3 days, the medium was changed to a differentiation medium, and after culturing for another 1 day, the resultant cells were collected with a cell lysis buffer, Pierce RIPA Buffer (Thermo Fisher Scientific) containing protease inhibitor cocktail, complete, Mini (manufactured by Roche Diagnostics) added thereto. The cells were crushed with a sonicator, Bioruptor UCD-250 (manufactured by Sonicbio Co., Ltd.) (output: H, three times each for 30 seconds), and centrifuged (15,000 rpm, 4° C., 15 minutes) with a cooling centrifuge (TOMY MX-305, rotor: AR015-24, manufactured by Tomy Seiko Co., Ltd.) to obtain a supernatant as a cell lysate. Pierce BCA Protein Assay Kit (manufactured by Thermo Fisher Scientific) was used to measure an absorbance at 562 nm with a plate reader, Synergy HTX Multi-Mode Microplate Reader (manufactured by BioTek Instruments), and a protein concentration in the cell lysate was obtained with data analysis software, Gen5 version 2.09.2 (manufactured by BioTek Instruments). The cell lysate (in an amount corresponding to 30 μg of protein) was subjected to electrophoresis (150 V, 75 minutes) with polyacrylamide gel NuPAGE 3 to 8%, Tris-Acetate, 1.5 mm, Mini Protein Gel, 15-well (manufactured by Thermo Fisher Scientific). As a molecular weight marker, HiMark Pre-Stained Protein Standard (manufactured by Thermo Fisher Scientific) was used.

[0678] After the electrophoresis, transcription (4 mA/cm², 30 minutes) was conducted into Immobilon-P Transfer membrane (manufactured by Merck Millipore) by semi-dry blotting. Western blotting was conducted by using, as a primary antibody, a 100-fold diluted anti-dystrophin antibody (NCL-Dys1, manufactured by Leica Biosystems Newcastle Ltd.), and as a secondary antibody, a 2,500-fold diluted goat anti-mouse IgG (H+L)—Horseradish Peroxidase complex (manufactured by Bio-Rad Laboratories). After completing the antibody reaction, light emission was caused with ECL Prime Western Blotting Detection System (manufactured by Cytiva), and the light emission was detected with a chemiluminescence gel imaging apparatus, ChemiDoc Touch MP Imaging System (manufactured by Bio-Rad Laboratories) to take an image.

### Results

[0679] The results are shown in FIG. 11.

[0680] In a negative control, or the mixture of PMO No. 1 and PMO No. 2 (Mix 2), the dystrophin protein was not expressed, but in the mixture additionally containing PMO No. 3 targeting hnRNP A1 (Mix 2+hnRNP A1), the expression of the dystrophin protein corresponding to exon 45 to 55 skipping was confirmed (FIG. 11). Mix 2 had the same definition as Mixture 2 used in Test Example 1 and Test Example 2.

### Example 3: Production of Antisense Oligomer-(2)

[0681] In the same manner as in Example 1, antisense oligomers shown in Table 12 (PMO Nos. 6 to 33) were synthesized. Theoretical values and actual values measured by ESI-TOR-MS of the molecular weights of the antisense oligomers are also shown. The 5′ end of each PMO is Group (1) as in Example 1. The synthesized PMO was dissolved in water for injection (manufactured by Otsuka Pharmaceutical Factory, Inc.).

TABLE 12

| | | | | Molecular weight | |
|---|---|---|---|---|---|
| PMO | SEQ | Target base | | Theoretical | Actual |
| No. | ID NO: | sequence | Base sequence of PMO | value | value |
| 6 | 1201, | H45_(−66)- | TGACAACAGTTTGCCGCTGCCCGATTAA | 9247.20 | 9247.20 |
| | 151 | (−61)_19-40 | | | |
| 7 | 3082 | H45_183-206 | TTTTCATTCCTATTAGATCTGTCG | 7869.71 | 7869.72 |
| 8 | 4950 | H55_(−4)-24 | AAAGCAGCCTCTCGCTCACTCACCCTGC | 9113.17 | 9113.17 |
| 9 | 1201, | H45_(−66)- | TGACAACAGTTTGCCGCTGCCCAAAAGATT | 10603.68 | 10603.69 |
| | 201 | (−57)_19-40 | AA | | |
| 10 | 1201, | H45_(−68)- | TGACAACAGTTTGCCGCTGCCCAAGATTAA | 10579.67 | 10579.67 |
| | 203 | (−59)_19-40 | AC | | |
| 11 | 1201, | H45_(−70)- | TGACAACAGTTTGCCGCTGCCCGATTAAAC | 10595.67 | 10595.68 |
| | 205 | (−61)_19-40 | AG | | |
| 12 | 1239, | H45_(−63)- | ACAGTTTGCCGCTGCCCAATGCCAT | 8198.85 | 8198.49 |
| | 114 | (−62)_13-35 | | | |
| 13 | 1224, | H45_(−66)- | CCAATGCCATCCTGGAGTTCCTGTAA | 8552.97 | 8553.61 |
| | 124 | (−64)_(−3)-20 | | | |
| 14 | 1180, | H45_(−66)- | CAATGCCATCCTGGAGTTCCTGGATTAA | 9262.21 | 9262.21 |
| | 151 | (−61)_(−3)-19 | | | |
| 15 | 1190, | H45_(−66)- | TGCCGCTGCCCAATGCCATCCTGATTAA | 9183.19 | 9183.22 |
| | 151 | (−61)_8-29 | | | |
| 16 | 1212, | H45_(−66)- | ATTCAATGTTCTGACAACAGTTGATTAA | 9284.22 | 9284.25 |
| | 151 | (−61)_30-51 | | | |
| 17 | 1222, | H45_(−66)- | CCCCAGTTGCATTCAATGTTCTGATTAA | 9212.19 | 9212.19 |
| | 151 | (−61)_40-61 | | | |
| 18 | 3060 | H45_161-184 | CGCCCTACCTCTTTTTTCTGTCTG | 7782.68 | 7782.67 |
| 19 | 3077 | H45_178-201 | ATTCCTATTAGATCTGTCGCCCTA | 7848.72 | 7848.99 |
| 20 | 3090 | H45_191-214 | CTAAAATGTTTTCATTCCTATTAG | 7886.73 | 7886.37 |
| 21 | 3096 | H45_197-220 | AGTCTGCTAAAATGTTTTCATTCC | 7887.73 | 7887.49 |
| 22 | 3108 | H45_209-232 | GAAAGCTTAAAAAGTCTGCTAAAA | 7996.80 | 7996.82 |
| 23 | 3119 | H45_220-243 | ATTCTTCTAAAGAAAGCTTAAAAA | 7946.78 | 7946.79 |
| 24 | 3065 | H45_166-189 | TCTGTCGCCCTACCTCTTTTTTCT | 7757.67 | 7757.89 |
| 25 | 3087 | H45_188-211 | AAATGTTTTCATTCCTATTAGATC | 7886.73 | 7886.24 |
| 26 | 3320 | H45_167-194 | TTAGATCTGTCGCCCTACCTCTTTTTTC | 9121.14 | 9121.27 |
| 27 | 4698 | H55_10-32 | TTTCTTCCAAAGCAGCCTCTCGC | 7479.60 | 7479.54 |
| 28 | 4702 | H55_14-36 | TGAGTTTCTTCCAAAGCAGCCTC | 7543.62 | 7543.28 |
| 29 | 4752 | H55_13-36 | TGAGTTTCTTCCAAAGCAGCCTCT | 7873.73 | 7873.59 |
| 30 | 4923 | H55_(−31)-(−4) | CAAAGGACCAAATGTTCAGATGCAATTA | 9312.25 | 9312.25 |
| 31 | 4926 | H55_(−28)-(−1) | CTGCAAAGGACCAAATGTTCAGATGCAA | 9313.25 | 9313.24 |
| 32 | 4936 | H55_(−18)-10 | CTCACTCACCCTGCAAAGGACCAAATGT | 9185.21 | 9185.24 |
| 33 | 4977 | H55_24-51 | TGTTGCAGTAATCTATGAGTTTCTTCCA | 9258.19 | 9258.19 |

[0682] A target base sequence of the antisense oligomer of the present invention was described as “Ha₁_b₁-C₁” or “Ha₂_b₂-C₂_Ha₃_b₃-C₃”.

[0683] “Ha₁” represents the ath exon of the human dystrophin gene, “b₁” represents the 5′-terminal base of the target base sequence, and “C₁” represents the 3′-terminal base of the target base sequence.

[0684] When “b₁” and “C₁” are positive integers, “b₁” and “C₁” each represent a base number in the downstream direction when the 5′-terminal base of the ath exon is counted as the 1st base. On the other hand, when “b₁” and “C₁” are negative numbers, “b₁” and “C₁” each represent a base number in the upstream direction when the 3′-terminal base of the (a-1) th intron is counted as the 1st base.

[0685] For example, “H55_(-18)-10” means a base sequence in which the 5′ end of the target base sequence is the 18th base in the upstream direction from the 3′ end of the 54th intron and the 3′ end of the target base sequence is the 10th base in the downstream direction from the 5′ end of the 55th intron.

[0686] “Ha₂_b₂-C₂” which is the first part of “Ha₂_b₂-C₂_Ha₃_b₃-C₃” means the target base sequence of a 3′ unit oligomer constituting the antisense oligomer, and the second part “Ha₃_b₃-C₃” means the target base sequence of a 5′ unit oligomer constituting the antisense oligomer.

[0687] When “Ha₂” and “Has” are the same, the “Ha₃” part may be omitted.

[0688] For example, “H45_(-66)-(-61) 19-40” or “H45 (-66)-(-61)_H45_19-40” means a base sequence in which the target base sequence of the 3′ unit oligomer constituting the antisense oligomer is “H45_(-66)-(-61)” and the target base sequence of the 5′ unit oligomer is “H45_19-40”.

### Example 4: Test on Multi-Exon Skipping Activity of Antisense Oligomer-(2)

### Test Example 1

### Assay of Exon 45 to 55 Multi-Exon Skipping in Normal Human-Derived Myoblasts-(1): Induction of Multi-Exon Skipping

### Procedures

[0689] Normal human-derived myoblasts (manufactured by LONZA) were subjected to direct immunofluorescence staining with PE anti-human CD82 antibody (manufactured by BioLegend, hereinafter the same), and the resultant was sorted with Cell Sorter SH800S (manufactured by Sony, hereinafter the same) to obtain CD82-positive normal human-derived myoblasts. The CD82-positive normal human-derived myoblasts were seeded in a collagen I coat microplate 96-well (manufactured by AGC Techno Glass Co., Ltd.) coated with Corning (R) Matrigel Basement Membrane Matrix (manufactured by Corning, hereinafter the same) at 5×10⁴/well, and cultured for 1 day under conditions of 37° C. and 5% CO₂ in 0.1 mL of a growth medium for normal human myoblasts (DMEM, high glucose, GlutaMAX (TM) Supplement, Pyruvate (manufactured by Thermo Fisher Scientific, hereinafter the same) supplemented with 20% fetal bovine serum (FBS) (manufactured by Corning, hereinafter the same), 0.1% hBFGF (manufactured by Sigma Aldrich), and 1% penicillin/streptomycin (P/S) (manufactured by Sigma Aldrich, hereinafter the same)). On the next day of the seeding, the medium was changed from the growth medium to 0.2 mL of a differentiation medium for normal human myoblasts (DMEM, High Glucose, GlutaMAX (TM) Supplement, Pyruvate supplemented with 2% horse serum (manufactured by Thermo Fisher Scientific), 1% ITS liquid medium supplement (100×) (manufactured by Sigma Aldrich), and P/S). After culturing for 7 days, transfection was performed with PMO using 6 μM Endo-Porter (manufactured by Gene Tools). PMOs used here are shown in Table 13 below. PMOs targeting the same position in the human dystrophin gene as PMO Nos. 1 to 3 targeting the mouse dystrophin gene were used.

TABLE 13

| PMO No. | Base sequence of PMO (5′ to 3′) | SEQ ID NO: |
|---|---|---|
| 6 | TGACAACAGTTTGCCGCTGCCCGATTAA | 1201, 151 |
| 7 | TTTTCATTCCTATTAGATCTGTCG | 3082 |
| 8 | AAAGCAGCCTCTCGCTCACTCACCCTGC | 4950 |

[0690] The used PMOs and concentrations thereof in the medium are shown in Table 14 below.

TABLE 14

| Condition | PMO No. 6 (μM) | PMO No. 7 (μM) | PMO No. 8 (μM) |
|---|---|---|---|
| 1 | — | — | — |
| 2 | 10 | 10 | 10 |
| 3 | 20 | 20 | 20 |
| 4 | 30 | 30 | 30 |
| 5 | 30 | — | 30 |
| 6 | 30 | 30 | — |
| 7 | — | 30 | 30 |
| 8 | 60 | — | — |
| 9 | — | 60 | — |
| 10 | — | — | 60 |

[0691] After culturing for another 3 days, the medium was changed to 0.25 mL of a differentiation medium for normal human myoblasts. Seven days after the addition of PMO, the cells were washed once with PBS (manufactured by Takara Bio Inc.), and the total RNA was extracted with RNeasy Micro Kit (manufactured by Qiagen K. K.). 75 μL of Buffer RLT (manufactured by Qiagen K. K.) containing 1%2-mercaptoethanol (manufactured by Nacalai Tesque, Inc.) was added to the cells, and after the cells were allowed to stand at room temperature for a few minutes to lyse the cells, the total RNA was extracted according to the protocol attached to RNeasy Mini Kit (manufactured by Qiagen K. K.). The concentration of the total RNA extracted was determined using a NanoDrop One C (manufactured by Thermo Fisher Scientific). One-Step RT-PCR was performed with 100 ng of the extracted total RNA using QIAGEN One Step RT-PCR Kit (manufactured by Qiagen K. K.). A reaction solution was prepared in accordance with the protocol attached to the kit. Veriti 96 Well Thermal Cycler (manufactured by Thermo Fisher Scientific) was used as the thermal cycler. The RT-PCR program used here was as follows.
[0692] 50° C., 30 mins: reverse transcription reaction
[0693] 95° C., 15 mins: polymerization activation, reverse transcriptase inactivation, CDNA thermal denaturation
[0694] [94° C., 30 seconds; 57° C., 30 seconds; 72° C., 1 minute]×33 cycles: PCR amplification
[0695] 72° C., 10 mins: final extension

[0696] The base sequences of forward primers and reverse primers used in the RT-PCR are shown in Table 15 below.

TABLE 15

| | | SEQ |
|---|---|---|
| Primer | Base sequence (5′ to 3′) | ID NO: |
| Forward primer 1 | GTTGAGAAATGGCGGCGTTT | 5106 |
| Forward primer 2 | ATGACATACGCCCAAAGGTG | 5107 |
| Reverse primer 1 | TGTTGAGAGACTTTTTCCGAAGT | 5108 |
| Reverse primer 2 | ATTCACCCCCTGCTGAATTT | 5109 |

[0697] Transcripts (301 bp) having multi-exon skipping of exons 45 to 55 can be detected by a combination of the forward primer 1 and the reverse primer 1. Transcripts (245 bp) of a region of exons 37 to 38 not affected by skipping can be detected by a combination of the forward primer 2 and the reverse primer 2.

[0698] The reaction product of the PCR was analyzed with MultiNA (manufactured by Shimadzu Corporation). The polynucleotide level “A” of the band with skipping of exons 45 to 55, and the polynucleotide level “B” of the band having no skipping were measured. Based on these measurement values of “A” and “B”, the skipping efficiency of exon 45 to 55 skipping was determined by the following equation:

Skipping efficiency of exon 45 to 55 skipping (%)=A/B×100

[0699] One-Step RT-PCR was performed for exon 45 skipping in the same manner as in the detection of exon 45 to 55 skipping by using primers shown in Table 16 below.

TABLE 16

| | | SEQ |
|---|---|---|
| Primer | Base sequence (5′ to 3′) | ID NO: |
| Forward primer | ATTTGACAGATCTGTTGAGAAATGG | 5110 |
| Reverse primer | AGTTGCTGCTCTTTTCCAGGT | 5111 |

[0700] Transcripts (268 bp) having skipping of exon 45 and transcripts (444 bp) having no skipping can be detected by a combination of the forward primer and the reverse primer.

[0701] The reaction product of the PCR was analyzed with MultiNA (manufactured by Shimadzu Corporation). The polynucleotide level “A” of the band with skipping of exon 45, and the polynucleotide level “B” of the band having no skipping were measured. Based on these measurement values of “A” and “B”, the skipping efficiency of exon 45 skipping was determined by the following equation:

$$Skipping efficiency of exon 45 skipping ( \% ) = A / ( A + B ) \times 100$$

### Results

[0702] The results are shown in FIGS. 12 and 13. It was confirmed that in the normal human cultured cells, exon 45 to 55 skipping is inducted by PMO No. 6 used singly (condition 8) and the mixture containing PMO No. 6 (conditions 2 to 6) (FIG. 12). On the other hand, the skipping efficiency of exon 45 skipping was reduced by the mixtures containing, in addition to PMO No. 6, PMO No. 7 targeting hnRNP A1 (conditions 2 to 4, and 6), and single skipping was thus suppressed (FIG. 13).

### Test Example 2

### Assay of Exon 45 to 55 Multi-Exon Skipping in DMD Patient-Derived Myoblasts with Exon 48 to 50 Deletion—(1): Induction of Multi-Exon Skipping

### Procedures

[0703] DMD patient-derived myoblasts with exon 48 to 50 deletion obtained from NCNP BioBank were subjected to direct immunofluorescence staining with PE anti-human CD82 antibody and APC anti-human CD56 antibody (manufactured by Milternyi Biotec, hereinafter the same), and the resultant was sorted with Cell Sorter SH800S to obtain CD56- and CD82-positive DMD patient-derived myoblasts with exon 48 to 50 deletion. The DMD patient-derived myoblasts with exon 48 to 50 deletion (CD56-positive and CD82-positive) were seeded in a Corning BioCoat collagen I 48-well transparent microplate coated with Corning (R) Matrigel Basement Membrane Matrix at 5×10⁴/well, and cultured for 1 day under conditions of 37° C. and 5% CO₂ in 0.25 mL of a growth medium for DMD patient-derived myoblasts (Dulbecco's Modified Eagle Medium: Nutrient Mixture F-12 (DMD/F12) (manufactured by Thermo Fisher Scientific, hereinafter the same) supplemented with 20% fetal bovine serum (FBS) and 1% P/S). On the next day of the seeding, the medium was changed from the growth medium to 0.5 mL of a differentiation medium for DMD patient-derived myoblasts (DMEM/F12 supplemented with 2% horse serum, 1% ITS liquid medium supplement (100×), and 1% P/S). After culturing for 6 days in the differentiation medium, transfection was performed with PMO using 6 μM Endo-Porter. The same PMOs as those used in Text Example 1 were used, and concentrations thereof in the medium are shown in Table 17 below.

TABLE 17

| | PMO No. 6 | PMO No. 7 | PMO No. 8 |
|---|---|---|---|
| Condition | (μ M) | (μ M) | (μ M) |
| 1 | — | — | — |
| 2 | 10 | 10 | 10 |
| 3 | 30 | 30 | 30 |
| 4 | 30 | — | 30 |

[0704] After culturing for another 3 days, the medium was changed to 0.5 mL of a differentiation medium. Seven days after the addition of PMO, the total RNA was extracted from the cells in the same manner as in Test Example 1 of Example 2, and One-Step RT-PCR was performed with 200 ng of the extracted total RNA in the same manner as in Test Example 1, and the reaction product of the PCR thus obtained was analyzed to obtain skipping efficiencies of exon 45 to 55 skipping and exon 45 skipping.

### Results

[0705] The results are shown in FIGS. 14 and 15.

[0706] In the DMD patient-derived myoblasts with exon 48 to 50 deletion, exon 45 to 55 skipping was confirmed to be caused by the mixture of PMO No. 6 and PMO No. 8 (condition 4). Exon 45 to 55 skipping was confirmed to be induced also by the mixtures further containing PMO NO. 7 targeting hnRNP A1 (conditions 2 and 3) (FIG. 14), but the skipping efficiency of exon 45 skipping was reduced, and single skipping was thus suppressed (FIG. 15).

### Test Example 3

### Assay of Exon 45 to 55 Multi-Exon Skipping in DMD Patient-Derived Myoblasts with Exon 48 to 50 Deletion—(2): Induction of Multi-Exon Skipping

### Procedures

[0707] DMD patient-derived myoblasts with exon 48 to 50 deletion (CD56-positive and CD82-positive) prepared in the same manner as in Test Example 2 were seeded in a Corning BioCoat collagen I 48-well transparent microplate coated with Corning (R) Matrigel Basement Membrane Matrix at 2×10⁴/well, and cultured for 3 days under conditions of 37° C. and 5% CO₂ in 0.25 mL of a growth medium for DMD patient-derived myoblasts. 3 days after the seeding, the medium was changed from the growth medium to 0.5 mL of a differentiation medium for DMD patient-derived myoblasts. After culturing for 8 days in the differentiation medium, transfection was performed with PMO using 6 μM Endo-Porter. The same PMOs as those used in Text Examples 1 and 2 were used, and concentrations thereof in the medium are shown in Table 18 below.

TABLE 18

| | PMO No. 6 | PMO No. 7 | PMO No.8 |
|---|---|---|---|
| Condition | (μ M) | (μ M) | (μ M) |
| 1 | — | — | — |
| 2 | 20 | 20 | 20 |
| 3 | 30 | — | 30 |
| 4 | 60 | — | — |

[0708] After culturing for another 3 days, the medium was changed to 0.5 mL of a differentiation medium. Six days after the addition of PMO, the total RNA was extracted in the same manner as in Test Example 2, and One-Step RT-PCR was performed with 200 ng of the extracted total RNA in the same manner as in Test Examples 1 and 2, and the reaction product of the PCR thus obtained was analyzed to obtain skipping efficiencies of exon 45 to 55 skipping and exon 45 skipping.

### Results

[0709] The results are shown in FIGS. 16 and 17.

[0710] As compared with PMO No. 6 used singly (condition 4), the mixtures additionally containing PMO No. 8 or PMO No. 7 and PMO No. 8 in addition to PMO No. 6 (conditions 2 and 3) increased the skipping efficiency of exon 45 to 55 skipping (FIG. 16). On the other hand, the mixture containing PMO No. 7 targeting hnRNP A1 (condition 2) reduced the skipping efficiency of exon 45 skipping, and single skipping was thus suppressed (FIG. 17).

### Test Example 4

### Assay of Exon 45 to 55 Multi-Exon Skipping in DMD Patient-Derived Myoblasts with Exon 48 to 50 Deletion—(3): Restoration of Dystrophin Protein by Multi-Exon Skipping

### Procedures

[0711] DMD patient-derived myoblasts with exon 48 to 50 deletion (CD56-positive and CD82-positive) were seeded in a collagen I coat microplate 24-well (manufactured by AGC Techno Glass Co., Ltd., hereinafter the same) coated with Corning (R) Matrigel Basement Membrane Matrix at 1.0×10⁵/well, and cultured for 1 day under conditions of 37° C. and 5% CO₂ in 1 mL of a growth medium for DMD patient-derived myoblasts. On the next day of the seeding, the medium was changed from the growth medium for DMD patient derived myoblasts to a differentiation medium for DMD patient-derived myoblasts. After culturing for 6 days, transfection was performed with PMO using 6 μM Endo-Porter. After culturing for another 3 days, the medium was changed to a differentiation medium, and after culturing for 7 days after the addition of PMO, a cell lysate was prepared in the same manner as in Test Example 4 of Example 2, and a protein concentration in the cell lysate was obtained. Western blotting was performed in the same manner as in Test Example 4 of Example 2 except that the cell lysate was used in an amount corresponding to 30 μg of protein, that the electrophoresis time was 120 minutes, and that a 250-fold diluted anti-dystrophin antibody (NCL-DYS1) was used, and thus the dystrophin protein was detected. Samples subjected to the electrophoresis are shown in Table 19. As a positive control of dystrophin expression, a lysate of mouse C2C12 cells having been muscle differentiation cultured for 12 days (normal dystrophin control), and a lysate of skeletal muscle of exon 45 to 55 deletion transgenic mouse (exon 45 to 55 deletion dystrophin expression control) were used.

TABLE 19

| Condition | Sample |
|---|---|
| 1 | Normal dystrophin control |
| 2 | Exon 45 to 55 deletion dystrophin expression control |
| 3 | No PMO added |
| 4 | 30 μ M PMO No. 6 + 30 μ M |
| | PMO No. 7 + 30 μ M PMO No. 8 |
| 5 | 30 μ M PMO No. 6 + 30 μ M |
| | PMO No. 8 |
| 6 | 10 μ M PMO No. 6 + 10 μ M |
| | PMO No. 7 + 10 μ M PMO No. 8 |

### Results

[0712] The results are shown in FIG. 18.

[0713] In the negative control (condition 3), the dystrophin protein was not expressed, but expression of the dystrophin protein corresponding to exon 45 to 55 skipping caused by the mixture of PMO No. 6 and PMO No. 8 (condition 5) and the mixtures of PMO Nos. 6 to 8 (conditions 4 and 6) was confirmed (FIG. 18: arrowhead).

### Test Example 5

### Assay of Exon 45 to 55 Multi-Exon Skipping in DMD Patient-Derived Myoblasts with Exon 46 to 51 Deletion—(1): Induction of Multi-Exon Skipping

### Procedures

[0714] DMD patient-derived myoblasts with exon 46 to 51 deletion (CD56-positive and CD82-positive) obtained by sorting DMD patient-derived myoblasts with exon 46 to 51 deletion obtained from NCNP BioBank in the same manner as in Test Example 2 were seeded in a Corning BioCoat collagen I 48-well transparent microplate coated with Corning (R) Matrigel Basement Membrane Matrix at 5×10⁴/well, and cultured for 1 day under conditions of 37° C. and 5% CO₂ in 0.25 mL of a growth medium for DMD patient-derived myoblasts. On the next day of the seeding, the medium was changed from the growth medium to 0.3 mL of a differentiation medium for DMD patient-derived myoblasts. After culturing for 6 days in the differentiation medium, transfection was performed with PMO using 6 μM Endo-Porter. The same PMOs as those used in Text Examples 1 to 4 were used, and concentrations thereof in the medium are shown in Table 20 below.

TABLE 20

| | PMO No. 6 | PMO No. 7 | PMO No. 8 |
|---|---|---|---|
| Condition | (μ M) | (μ M) | (μ M) |
| 1 | — | — | — |
| 2 | 30 | 30 | 30 |
| 3 | 30 | — | — |

[0715] After culturing for another 3 days, the medium was changed to 0.3 mL of a differentiation medium. Five days after the addition of PMO, the total RNA was extracted in the same manner as in Test Examples 2 to 3, One-Step RT-PCR was performed with 100 ng of the extracted total RNA in the same manner as in Test Examples 1 to 3, and the reaction product of the PCR thus obtained was analyzed to obtain skipping efficiency of exon 45 to 55 skipping. Besides, One-Step RT-PCR was performed in the same manner as in Test Examples 1 to 3 except that primers shown in Table 21 below were used, and the reaction product of the PCR thus obtained was analyzed to obtain skipping efficiency of exon 45 skipping. Transcripts (162 bp) having exon 45 skipping and transcripts (338 bp) having no skipping can be detected by a combination of the forward primer and the reverse primer.

TABLE 21

| | | SEQ |
|---|---|---|
| Primer | Base sequence (5′ to 3′) | ID NO: |
| Forward primer | GAGAAATGGCGGCGTTTTCA | 5112 |
| Reverse primer | GGGACGCCTCTGTTCCAAAT | 5113 |

### Results

[0716] The results are shown in FIGS. 19 and 20.

[0717] In the DMD patient-derived myoblasts with exon 46 to 51 deletion, exon 45 to 55 skipping was confirmed to be induced by PMO No. 6 used singly (condition 3) and the mixture of PMO Nos. 6 to 8 (condition 2) (FIG. 19). The efficiency of exon 45 skipping was reduced by the mixture containing PMO Nos. 6 to 8 (condition 2) as compared with that by PMO No. 6 used singly (condition 3), and single skipping was thus suppressed (FIG. 20).

### Test Example 6

### Assay of Exon 45 to 55 Multi-Exon Skipping in DMD Patient-Derived Myoblasts with Exon 46 to 51 Deletion—(2): Induction of Multi-Exon Skipping

### Procedures

[0718] DMD patient-derived myoblasts with exon 46 to 51 deletion (CD56-positive and CD82-positive) prepared in the same manner as in Test Example 5 were seeded in a Corning BioCoat collagen I 48-well transparent microplate coated with Corning (R) Matrigel Basement Membrane Matrix at 6.3×10³/well, and cultured for 4 days under conditions of 37° C. and 5% CO₂ in 0.25 mL of a growth medium for DMD patient-derived myoblasts. Four days after the seeding, the medium was changed from the growth medium to 0.3 mL of a differentiation medium for DMD patient-derived myoblasts. After culturing for 7 days in the differentiation medium, transfection was performed with PMO using 6 μM Endo-Porter. The same PMOs as those used in Text Examples 1 to 5 were used, and concentrations thereof in the medium are shown in Table 22 below.

TABLE 22

| | PMO No. 6 | PMO No. 7 | PMO No. 8 |
|---|---|---|---|
| Condition | (μ M) | (μ M) | (μ M) |
| 1 | 1 | — | — |
| 2 | 20 | 20 | 20 |
| 3 | 30 | — | 30 |
| 4 | — | 30 | 30 |
| 5 | 30 | 30 | — |
| 6 | 60 | — | — |

[0719] After culturing for another 3 days, the medium was changed to 0.3 mL of a differentiation medium. Seven days after the addition of PMO, the total RNA was extracted in the same manner as in Test Examples 2 to 3 and 5, and One-Step RT-PCR was performed in the same manner as in Test Example 5 except that 100 ng of the extracted total RNA was used, and the reaction product of the PCR thus obtained was analyzed to obtain skipping efficiencies of exon 45 to 55 skipping and exon 45 skipping.

### Results

[0720] The results are shown in FIGS. 21 and 22. In the DMD patient-derived myoblasts with exon 46 to 51 deletion, exon 45 to 55 skipping was confirmed to be induced by PMO No. 6 used singly (condition 6) and the mixtures containing PMO No. 6 (conditions 2, 3 and 5) (FIG. 21). The efficiency of exon 45 skipping was reduced by the mixture containing PMO No. 7 in addition to PMO No. 6 (condition 5) as compared with that by the mixture containing PMO No. 8 in addition to PMO No. 6 (condition 3), and single skipping was thus suppressed (FIG. 22).

### Test Example 7

### Assay of Exon 45 to 55 Multi-Exon Skipping in DMD Patient-Derived Myoblasts with Exon 46 to 51 Deletion—(4): Restoration of Dystrophin Protein by Multi-Exon Skipping

### Procedures

[0721] DMD patient-derived myoblasts with exon 46 to 51 deletion (CD56-positive and CD82-positive) were seeded in a collagen I coat microplate 24-well coated with Corning (R) Matrigel Basement Membrane Matrix at 8.0×10⁴/well, and cultured for 1 day under conditions of 37° C. and 5% CO₂ in 1 mL of a growth medium for DMD patient-derived myoblasts. On the next day of the seeding, the medium was changed from the growth medium for DMD patient derived myoblasts to 1 mL of a differentiation medium for DMD patient-derived myoblasts. After culturing 4 days, the medium was changed, and after culturing for 7 days, transfection was performed with PMO using 6 μM Endo-Porter. After culturing for another 3 days, the medium was changed to a differentiation medium, and after culturing for 7 days after the addition of PMO, a cell lysate was prepared in the same manner as in Test Example 4 of Example 2 and Test Example 4 of the present example, and Western blotting was performed in the same manner as in Test Example 4 of Example 2 and Test Example 4 of the present example except that the cell lysate was used in an amount corresponding to 24 μg of protein to detect the dystrophin protein. Samples subjected to the electrophoresis are shown in Table 23 below.

TABLE 23

| Condition | Sample |
|---|---|
| 1 | Normal dystrophin control |
| 2 | Exon 45 to 55 deletion dystrophin |
| | expression control |
| 3 | No PMO added |
| 4 | 30 μ M PMO No. 6 + 30 μ M |
| | PMO No. 7 + 30 μ M PMO No. 8 |
| 5 | 30 μ M PMO No. 6 + 30 μ M |
| | PMO No. 8 |

### Results

[0722] The results are shown in FIG. 23.

[0723] In the negative control (condition 3), the dystrophin protein was not expressed, but expression of the dystrophin protein corresponding to exon 45 to 55 skipping caused by the mixture of PMO No. 6 and PMO No. 8 (condition 5) and the mixture of PMO Nos. 6 to 8 (condition 4) was confirmed (FIG. 23: arrowhead).

### Test Example 8

### Assay of Exon 45 to 55 Multi-Exon Skipping in DMD Patient-Derived Myoblasts with Exon 51 Deletion—(1): Study of First Antisense Oligomer—(1)

### Procedures

[0724] DMD patient-derived myoblasts with exon 51 deletion (CD-56 positive, CD-82 positive) obtained by sorting DMD patient-derived myoblasts with exon 51 deletion obtained from NCNP BioBank in the same manner as in Example 3 and 6 were seeded in a collagen I coat microplate 24-well (manufactured by AGC Techno Glass Co., Ltd.) coated with Corning (R) Matrigel Basement Membrane Matrix at 5×10⁴/well, and cultured for 3 days under conditions of 37° C. and 5% CO₂ in 0.5 mL of a growth medium for DMD patient-derived myoblasts. Three days after the seeding, the medium was changed from the growth medium to 0.5 mL of a differentiation medium for DMD patient-derived myoblasts. After culturing for 4 days in the differentiation medium for DMD patient-derived myoblasts, transfection was performed with PMO using 6 μM Endo-Porter. In addition to the PMOs used in Text Examples 1 to 7, PMOs shown in Table 24 below were also used.

TABLE 24

| PMO | | SEQ |
|---|---|---|
| No. | Base sequence of PMO (5′ to 3′) | ID NO: |
| 9 | TGACAACAGTTTGCCGCTGCCCAAAAGATTAA | 1201, 201 |
| 10 | TGACAACAGTTTGCCGCTGCCCAAGATTAAAC | 1201, 203 |
| 11 | TGACAACAGTTTGCCGCTGCCCGATTAAACAG | 1201, 205 |

[0725] The PMOs were added in concentrations in the medium shown in Table 25 below.

| Condition | PMO |
|---|---|
| 1 | No PMO added |
| 2 | 30 μ M PMO No. 6 + 30 μ M PMO No. 8 |
| 3 | 20 μ M PMO No. 6 + 20 μ M PMO |
| | No. 7 + 20 μ M PMO No. 8 |
| 4 | 30 μ M PMO No. 9 + 30 μ M PMO No. 8 |
| 5 | 20 μ M PMO No. 9 + 20 μ M PMO |
| | No. 7 + 20 μ M PMO No. 8 |
| 6 | 30 μ M PMO No. 10 + 30 μ M PMO No. 8 |
| 7 | 20 μ M PMO No. 10 + 20 μ M PMO |
| | No. 7 + 20 μ M PMO No. 8 |
| 8 | 30 μ M PMO No. 11 + 30 μ M PMO No. 8 |
| 9 | 20 μ M PMO No. 11 + 20 μ M PMO |
| | No. 7 + 20 μ M PMO No. 8 |

[0726] After culturing for another 3 days, the medium was changed to 0.5 mL of a differentiation medium for DMD patient-derived myoblasts. Seven days after the addition of PMO, the total RNA was extracted in the same manner as in Test Examples 2, 3, 5, and 6, One-Step RT-PCR was performed with 200 ng of the extracted total RNA in the same manner as in Test Examples 1 to 3, and the reaction product of the PCR thus obtained was analyzed to obtain skipping efficiencies of exon 45 to 55 skipping and exon 45 skipping.

### Results

[0727] The results are shown in FIGS. 24 and 25. In the DMD patient-derived myoblasts with exon 51 deletion, exon 45 to 55 skipping was confirmed to be induced by the mixture of PMO No. 6 and PMO No. 8 (condition 2) (FIG. 24). Exon 45 to 55 skipping was also confirmed to be induced by the mixture containing, in addition to PMO No. 6 and PMO No. 8, PMO No. 7 targeting hnRNPA1 (condition 3) (FIG. 24). Besides, exon 45 to 55 skipping was confirmed to be induced in the conditions 4, 6 and 8 in which PMO Nos. 9 to 11 were added as the first antisense oligomer together with PMO No. 8. Exon 45 to 55 skipping was also confirmed to be induced in the conditions 5, 7, and 9 in which PMO No. 7 targeting hnRNP A1 was further added (FIG. 24), but the skipping efficiency of exon 45 skipping was reduced, and single skipping was thus suppressed (FIG. 25).

### Test Example 9

### Assay of Exon 45 to 55 Multi-Exon Skipping in DMD Patient-Derived Myoblasts with Exon 51 Deletion—(2): Study of First Antisense Oligomer—(2)

### Procedures

[0728] DMD patient-derived myoblasts with exon 51 deletion (CD-56 positive, CD-82 positive) prepared in the same manner as in Test Example 8 were seeded in a Corning BioCoat collagen I 48-well transparent microplate coated with Corning (R) Matrigel Basement Membrane Matrix at 5×10⁴/well, and cultured for 1 day under conditions of 37° C. and 5% CO₂ in 0.25 mL of a growth medium for DMD patient-derived myoblasts. On the next day of the seeding, the medium was changed from the growth medium to 0.25 mL of a differentiation medium for DMD patient-derived myoblasts. After culturing for 7 days in the differentiation medium for DMD patient-derived myoblasts, transfection was performed with PMO using 6 μM Endo-Porter. In addition to the PMOs used in Text Examples 1 to 7, PMOs shown in Table 26 below were used.

TABLE 26

| PMO | | SEQ |
|---|---|---|
| No. | Base sequence of PMO (5′ to 3′) | ID NO: |
| 12 | ACAGTTTGCCGCTGCCCAATGCCAT | 1239, 114 |
| 13 | CCAATGCCATCCTGGAGTTCCTGTAA | 1224, 124 |
| 14 | CAATGCCATCCTGGAGTTCCTGGATTAA | 1180, 151 |
| 15 | TGCCGCTGCCCAATGCCATCCTGATTAA | 1190, 151 |
| 16 | ATTCAATGTTCTGACAACAGTTGATTAA | 1212, 151 |
| 17 | CCCCAGTTGCATTCAATGTTCTGATTAA | 1222, 151 |

[0729] The PMOs were added in concentrations in the medium shown in Table 27 below.

TABLE 27

| Condition | PMO |
|---|---|
| 1 | No PMO added |
| 2 | 30 μ M PMO No. 6 + 30 μ M PMO No. 8 |
| 3 | 20 μ M PMO No. 6 + 20 μ M |
| | PMO No. 7 + 20 μ M PMO No. 8 |
| 4 | 30 μ M PMO No. 12 + 30 μ M PMO No. 8 |
| 5 | 20 μ M PMO No. 12 + 20 μ M |
| | PMO No. 7 + 20 μ M PMO No. 8 |
| 6 | 30 μ M PMO No. 13 + 30 μ M PMO No. 8 |
| 7 | 20 μ M PMO No. 13 + 20 μ M |
| | PMO No. 7 + 20 μ M PMO No. 8 |
| 8 | 30 μ M PMO No. 14 + 30 μ M PMO No. 8 |
| 9 | 20 μ M PMO No. 14 + 20 μ M |
| | PMO No. 7 + 20 μ M PMO No. 8 |
| 10 | 30 μ M PMO No. 15 + 30 μ M PMO No. 8 |
| 11 | 20 μ M PMO No. 15 + 20 μ M |
| | PMO No. 7 + 20 μ M PMO No. 8 |
| 12 | 30 μ M PMO No. 16 + 30 μ M PMO No. 8 |
| 13 | 20 μ M PMO No. 16 + 20 μ M |
| | PMO No. 7 + 20 μ M PMO No. 8 |
| 14 | 30 μ M PMO No. 17 + 30 μ M PMO No. 8 |
| 15 | 20 μ M PMO No. 17 + 20 μ M |
| | PMO No. 7 + 20 μ M PMO No. 8 |

[0730] After culturing for another 3 days, the medium was changed to 0.3 mL of a differentiation medium for DMD patient-derived myoblasts. Seven days after the addition of PMO, the total RNA was extracted in the same manner as in Test Examples 2, 3, 5, 6, and 8, One-Step RT-PCR was performed with 200 ng of the extracted total RNA in the same manner as in Test Examples 1 to 3 and 8, and the reaction product of the PCR thus obtained was analyzed to obtain skipping efficiencies of exon 45 to 55 skipping and exon 45 skipping.

### Results

[0731] The results are shown in FIGS. 26 and 27. Exon 45 to 55 skipping was confirmed to be induced also in the conditions 4, 6, 8, and 10 in which PMO Nos. 12 to 17 were added as the first antisense oligomer together with PMO No. 8. Exon 45 to 55 skipping was confirmed to be induced also in the conditions 5, 7, 9, and 11 in which PMO No. 7 targeting hnRNP A1 was further added (FIG. 26), but the skipping efficiency of exon 45 skipping was reduced, and single skipping was thus suppressed (FIG. 27).

### Test Example 10

### Assay of Exon 45 to 55 Multi-Exon Skipping in DMD Patient-Derived Myoblasts with Exon 51 Deletion—(3): Study of Third Antisense Oligomer—(1)

### Procedures

[0732] DMD patient-derived myoblasts with exon 51 deletion (CD-56 positive, CD-82 positive) prepared in the same manner as in Test Examples 8 and 9 were seeded in a Corning BioCoat collagen I 48-well transparent microplate coated with Corning (R) Matrigel Basement Membrane Matrix at 5×10⁴/well, and cultured for 1 day under conditions of 37° C. and 5% CO₂ in 0.25 mL of a growth medium for DMD patient-derived myoblasts. On the next day of the seeding, the medium was changed from the growth medium to 0.25 mL of a differentiation medium for DMD patient-derived myoblasts. After culturing for 7 days in the differentiation medium for DMD patient-derived myoblasts, transfection was performed with PMO using 6 μM Endo-Porter. In addition to the PMOs used in Text Examples 1 to 7, PMOs shown in Table 28 below were used.

TABLE 28

| PMO | | SEQ |
|---|---|---|
| No. | Base sequence of PMO (5′ to 3′) | ID NO: |
| 18 | CGCCCTACCTCTTTTTTCTGTCTG | 3060 |
| 19 | ATTCCTATTAGATCTGTCGCCCTA | 3077 |
| 20 | CTAAAATGTTTTCATTCCTATTAG | 3090 |
| 21 | AGTCTGCTAAAATGTTTTCATTCC | 3096 |
| 22 | GAAAGCTTAAAAAGTCTGCTAAAA | 3108 |
| 23 | ATTCTTCTAAAGAAAGCTTAAAAA | 3119 |

[0733] The PMOs were added in concentrations in the medium shown in Table 29 below.

TABLE 29

| Condition | PMO |
|---|---|
| 1 | No PMO added |
| 2 | 30 μ M PMO No. 6 + 30 μ M PMO No. 8 |
| 3 | 20 μ M PMO No. 6 + 20 μ M PMO |
| | No. 18 + 20 μ M PMO No. 8 |
| 4 | 20 μ M PMO No. 6 + 20 μ M PMO |
| | No. 19 + 20 μ M PMO No. 8 |
| 5 | 20 μ M PMO No. 6 + 20 μ M PMO |
| | No. 7 + 20 μ M PMO No. 8 |
| 6 | 20 μ M PMO No. 6 + 20 μ M PMO |
| | No. 20 + 20 μ M PMO No. 8 |
| 7 | 20 μ M PMO No. 6 + 20 μ M PMO |
| | No. 21 + 20 μ M PMO No. 8 |
| 8 | 20 μ M PMO No. 6 + 20 μ M PMO |
| | No. 22 + 20 μ M PMO No. 8 |
| 9 | 20 μ M PMO No. 6 + 20 μ M PMO |
| | No. 23 + 20 μ M PMO No. 8 |

[0734] After culturing for another 3 days, the medium was changed to 0.3 mL of a differentiation medium for DMD patient-derived myoblasts. Seven days after the addition of PMO, the total RNA was extracted in the same manner as in Test Examples 2, 3, 5, 6, 8, and 9, One-Step RT-PCR was performed with 200 ng of the extracted total RNA in the same manner as in Test Examples 1 to 3, 8, and 9, and the reaction product of the PCR thus obtained was analyzed to obtain skipping efficiencies of exon 45 to 55 skipping and exon 45 skipping.

### Results

[0735] The results are shown in FIGS. 28 and 29. As a result of adding PMO Nos. 20 to 23 as the third antisense oligomer to PMO No. 6 and PMO No. 8, exon 45 to 55 skipping was confirmed to be induced to the same extent as in a case where PMO No. 7 was added (conditions 5) (FIG. 28). Exon 45 skipping was reduced, and single skipping tended to be suppressed (FIG. 29). On the other hand, although exon 45 skipping efficiency was not reduced by the mixture containing PMO Nos. 18 and 19 (conditions 3 and 4) as compared with the mixture containing PMO No. 7 (condition 5), exon 45 to 55 skipping was confirmed to be more highly induced as compared with that in a negative control (condition 1).

### Test Example 11

### Assay of Exon 45 to 55 Multi-Exon Skipping in DMD Patient-Derived Myoblasts with Exon 51 Deletion—(4): Study of Third Antisense Oligomer—(2)

### Procedures

[0736] DMD patient-derived myoblasts with exon 51 deletion (CD-56 positive, CD-82 positive) prepared in the same manner as in Test Examples 8 to 10 were seeded in a Corning BioCoat collagen I 48-well transparent microplate coated with Corning (R) Matrigel Basement Membrane Matrix at 5×10⁴/well, and cultured for 1 day under conditions of 37° C. and 5% CO₂ in 0.25 mL of a growth medium for DMD patient-derived myoblasts. On the next day of the seeding, the medium was changed from the growth medium to 0.25 mL of a differentiation medium for DMD patient-derived myoblasts. After culturing for 3 days in the differentiation medium for DMD patient-derived myoblasts, transfection was performed with PMO using 6 μM Endo-Porter. In addition to the PMOs used in Text Examples 1 to 7, PMOs shown in Table 30 below were used.

TABLE 30

| PMO | | SEQ |
|---|---|---|
| No. | Base sequence of PMO (5′ to 3′) | ID NO: |
| 19 | ATTCCTATTAGATCTGTCGCCCTA | 3077 |
| 20 | CTAAAATGTTTTCATTCCTATTAG | 3090 |
| 21 | AGTCTGCTAAAATGTTTTCATTCC | 3096 |
| 24 | TCTGTCGCCCTACCTCTTTTTTCT | 3065 |
| 25 | AAATGTTTTCATTCCTATTAGATC | 3087 |
| 26 | TTAGATCTGTCGCCCTACCTCTTTTTTC | 3320 |

[0737] The PMOs were added in concentrations in the medium shown in Table 31 below.

TABLE 31

| Condition | PMO |
|---|---|
| 1 | No PMO added |
| 2 | 20 μ M PMO No. 6 + 20 μ M |
| | PMO No. 24 + 20 μ M PMO No. 8 |
| 3 | 20 μ M PMO No. 6 + 20 μ M |
| | PMO No. 19 + 20 μ M PMO No. 8 |
| 4 | 20 μ M PMO No. 6 + 20 μ M |
| | PMO No. 7 + 20 μ M PMO No. 8 |
| 5 | 20 μ M PMO No. 6 + 20 μ M |
| | PMO No. 25 + 20 μ M PMO No. 8 |
| 6 | 20 μ M PMO No. 6 + 20 uM |
| | PMO No. 20 + 20 μ M PMO No. 8 |
| 7 | 20 μ M PMO No. 6 + 20 μ M |
| | PMO No. 21 + 20 μ M PMO No. 8 |
| 8 | 20 μ M PMO No. 6 + 20 μ M |
| | PMO No. 26 + 20 μ M PMO No. 8 |

[0738] After culturing for another 3 days, the medium was changed to 0.3 mL of a differentiation medium for DMD patient-derived myoblasts. Seven days after the addition of PMO, the total RNA was extracted in the same manner as in Test Examples 2, 3, 5, 6, and 8 to 10, One-Step RT-PCR was performed with 200 ng of the extracted total RNA in the same manner as in Test Examples 1 to 3 and 8 to 10, and the reaction product of the PCR thus obtained was analyzed to obtain skipping efficiencies of exon 45 to 55 skipping and exon 45 skipping.

### Results

[0739] The results are shown in FIGS. 30 and 31. As a result of adding PMO Nos. 24 to 26 as the third antisense oligomer to PMO No. 6 and PMO No. 8 (conditions 2, 5, and 8), exon 45 to 55 skipping efficiency was reduced when PMO Nos. 24 and 26 were added (conditions 2 and 8) as compared with a case where PMO No. 7 was added (condition 4), but exon 45 to 55 skipping was confirmed to be induced to the same extent when PMO No. 25 was added (condition 5) (FIG. 30). Exon 45 skipping efficiency was reduced when PMO No. 25 was added (condition 5), and single skipping was thus suppressed (FIG. 31).

### Test Example 12

### Assay of Exon 45 to 55 Multi-Exon Skipping in DMD Patient-Derived Myoblasts with Exon 51 Deletion—(5): Study of Second Antisense Oligomer—(1)

### Procedures

[0740] DMD patient-derived myoblasts with exon 51 deletion (CD-56 positive, CD-82 positive) prepared in the same manner as in Test Examples 8 to 11 were seeded in a Corning BioCoat collagen I 48-well transparent microplate coated with Corning (R) Matrigel Basement Membrane Matrix at 5×10⁴/well, and cultured for 1 day under conditions of 37° C. and 5% CO₂ in 0.25 mL of a growth medium for DMD patient-derived myoblasts. On the next day of the seeding, the medium was changed from the growth medium to 0.25 mL of a differentiation medium for DMD patient-derived myoblasts. After culturing for 7 days in the differentiation medium for DMD patient-derived myoblasts, transfection was performed with PMO using 6 μM Endo-Porter.

[0741] In addition to the PMOs used in Text Examples 1 to 7, PMOs shown in Table 32 below were used.

TABLE 32

| PMO | | SEQ |
|---|---|---|
| No. | Base sequence of PMO (5′ to 3′) | ID NO: |
| 27 | TTTCTTCCAAAGCAGCCTCTCGC | 4698 |
| 28 | TGAGTTTCTTCCAAAGCAGCCTC | 4702 |
| 29 | TGAGTTTCTTCCAAAGCAGCCTCT | 4752 |
| 30 | CAAAGGACCAAATGTTCAGATGCAATTA | 4923 |
| 31 | CTGCAAAGGACCAAATGTTCAGATGCAA | 4926 |
| 32 | CTCACTCACCCTGCAAAGGACCAAATGT | 4936 |
| 33 | TGTTGCAGTAATCTATGAGTTTCTTCCA | 4977 |

[0742] The PMOs were added in concentrations in the medium shown in Table 33 below.

TABLE 33

| Condition | PMO |
|---|---|
| 1 | No PMO added |
| 2 | 30 μ M PMO No. 6 + 30 μ M PMO No. 27 |
| 3 | 30 μ M PMO No. 6 + 30 μ M PMO No. 28 |
| 4 | 30 μ M PMO No. 6 + 30 μ M PMO No. 29 |
| 5 | 30 μ M PMO No. 6 + 30 μ M PMO No. 30 |
| 6 | 30 μ M PMO No. 6 + 30 μ M PMO No. 31 |
| 7 | 30 μ M PMO No. 6 + 30 μ M PMO No. 32 |
| 8 | 30 μ M PMO No. 6 + 30 μ M PMO No. 8 |
| 9 | 30 μ M PMO No. 6 + 30 μ M PMO No. 33 |
| 10 | 20 μ M PMO No. 6 + 20 μ M |
| | PMO No. 7 + 20 μ M PMO No. 8 |

[0743] After culturing for another 3 days, the medium was changed to 0.3 mL of a differentiation medium for DMD patient-derived myoblasts. Seven days after the addition of PMO, the total RNA was extracted in the same manner as in Test Examples 2, 3, 5, 6, and 8 to 11, One-Step RT-PCR was performed with 200 ng of the extracted total RNA in the same manner as in Test Examples 1 to 3 and 8 to 11, and the reaction product of the PCR thus obtained was analyzed to obtain skipping efficiencies of exon 45 to 55 skipping and exon 45 skipping.

### Results

[0744] The results are shown in FIGS. 32 and 33.

[0745] As a result of adding PMO Nos. 27 to 33 as the second antisense oligomer together with PMO No. 6 (conditions 2 to 7, and 9), exon 45 to 55 skipping was confirmed to be induced to the same extent as in a case where PMO No. 8 was added (condition 8) (FIG. 32). Even when the second antisense oligomer was changed, exon 45 skipping efficiency was not reduced, and single skipping was not suppressed (FIG. 33).

### Test Example 13

### Assay of Exon 45 to 55 Multi-Exon Skipping in DMD Patient-Derived Myoblasts with Exon 51 Deletion—(6): Study of Second Antisense Oligomer—(2)

### Procedures

[0746] DMD patient-derived myoblasts with exon 51 deletion (CD-56 positive, CD-82 positive) prepared in the same manner as in Test Examples 8 to 12 were seeded in a Corning BioCoat collagen I 48-well transparent microplate coated with Corning (R) Matrigel Basement Membrane Matrix at 5×10⁴/well, and cultured for 1 day under conditions of 37° C. and 5% CO₂ in 0.25 mL of a growth medium for DMD patient-derived myoblasts. On the next day of the seeding, the medium was changed from the growth medium to 0.25 mL of a differentiation medium for DMD patient-derived myoblasts. After culturing for 3 days in the differentiation medium for DMD patient-derived myoblasts, transfection was performed with PMO using 6 μM Endo-Porter. The PMOs used in Text Example 12 were used in concentrations in the medium shown in Table 34 below.

TABLE 34

| Condition | PMO |
|---|---|
| 1 | No PMO added |
| 2 | 20 μ M PMO No. 6 + 20 μ M |
| | PMO No. 7 + 20 μ M PMO No. 27 |
| 3 | 20 μ M PMO No. 6 + 20 μ M |
| | PMO No. 7 + 20 μ M PMO No. 28 |
| 4 | 20 μ M PMO No. 6 + 20 μ M |
| | PMO No. 7 + 20 μ M PMO No. 29 |
| 5 | 20 μ M PMO No. 6 + 20 μ M |
| | PMO No. 7 + 20 μ M PMO No. 32 |
| 6 | 20 μ M PMO No. 6 + 20 μ M |
| | PMO No. 7 + 20 μ M PMO No. 8 |

[0747] After culturing for another 3 days, the medium was changed to 0.3 mL of a differentiation medium for DMD patient-derived myoblasts. Seven days after the addition of PMO, the total RNA was extracted in the same manner as in Test Examples 2, 3, 5, 6, and 8 to 12, One-Step RT-PCR was performed with 200 ng of the extracted total RNA in the same manner as in Test Examples 1 to 3 and 8 to 12, and the reaction product of the PCR thus obtained was analyzed to obtain skipping efficiencies of exon 45 to 55 skipping and exon 45 skipping.

### Results

[0748] The results are shown in FIGS. 34 and 35. As a result of respectively adding PMO Nos. 27 to 29 and 32 together with PMO No. 6 and PMO No. 7 (conditions 2 to 5), exon 45 to 55 skipping was confirmed to be induced to the same extent as in a case where PMO No. 8 was added (condition 6) (FIG. 34). The induction of exon 45 skipping was little confirmed excluding a case where PMO No. 32 was added (condition 5), and single skipping was thus suppressed (FIG. 35).

### Test Example 14

### Assay of Exon 45 to 55 Multi-Exon Skipping in DMD Patient-Derived Myoblasts with Exon 51 Deletion—(7): Study of Second Antisense Oligomer—(3)

### Procedures

[0749] DMD patient-derived myoblasts with exon 51 deletion (CD-56 positive, CD-82 positive) prepared in the same manner as in Test Examples 8 to 13 were seeded in a Corning BioCoat collagen I 48-well transparent microplate coated with Corning (R) Matrigel Basement Membrane Matrix at 5×10⁴/well, and cultured for 1 day under conditions of 37° C. and 5% CO₂ in 0.25 mL of a growth medium for DMD patient-derived myoblasts. On the next day of the seeding, the medium was changed from the growth medium to 0.25 mL of a differentiation medium for DMD patient-derived myoblasts. After culturing for 7 days in the differentiation medium for DMD patient-derived myoblasts, transfection was performed with PMO using 6 μM Endo-Porter. The PMOs used in Text Example were added in concentrations in the medium shown in Table 35 below.

TABLE 35

| Condition | PMO |
|---|---|
| 1 | No PMO added |
| 2 | 30 μ M PMO No. 6 + 30 AM PMO No. 8 |
| 3 | 20 μ M PMO No. 6 + 20 μ M PMO |
| | No. 7 + 20 μ M PMO No. 30 |
| 4 | 20 μ M PMO No. 6 + 20 μ M PMO |
| | No. 7 + 20 μ M PMO No. 31 |
| 5 | 20 μ M PMO No. 6 + 20 μ M PMO |
| | No. 7 + 20 μ M PMO No. 8 |
| 6 | 20 μ M PMO No. 6 + 20 μ M PMO |
| | No. 7 + 20 μ M PMO No. 33 |

[0750] After culturing for another 3 days, the medium was changed to 0.3 mL of a differentiation medium for DMD patient-derived myoblasts. Seven days after the addition of PMO, the total RNA was extracted in the same manner as in Test Examples 2, 3, 5, 6, and 8 to 13, One-Step RT-PCR was performed with 200 ng of the extracted total RNA in the same manner as in Test Examples 1 to 3 and 8 to 13, and the reaction product of the PCR thus obtained was analyzed to obtain skipping efficiencies of exon 45 to 55 skipping and exon 45 skipping.

### Results

[0751] The results are shown in FIGS. 36 and 37.

[0752] As a result of respectively adding PMO No. 30, 31, or 33 as the second antisense oligomer together with PMO No. 6 and PMO No. 7 (conditions 3, 4, and 6), exon 45 to 55 skipping was confirmed to the same extent as in a case where PMO No. 8 was added (condition 5) (FIG. 36). As compared with a case where only PMO No. 6 and PMO No. 8 were added (condition 2), the skipping efficiency of exon 45 skipping was all reduced, and single skipping was thus suppressed (FIG. 37).

### Test Example 15

### Assay of Exon 45 to 55 Multi-Exon Skipping in DMD Patient-Derived Myoblasts with Exon 51 Deletion—(8): Restoration of Dystrophin Protein by Multi-Exon Skipping

### Procedures

[0753] DMD patient-derived myoblasts with exon 51 deletion (CD56-positive and CD82-positive) were seeded in a collagen I coat microplate 24-well (manufactured by AGC Techno Glass Co., Ltd.) coated with Corning (R) Matrigel Basement Membrane Matrix at 2.0×10⁵/well, and cultured for 1 day under conditions of 37° C. and 5% CO₂ in 1 mL of a growth medium for DMD patient-derived myoblasts. On the next day of the seeding, the medium was changed from the growth medium for DMD patient derived myoblasts to a differentiation medium for DMD patient-derived myoblasts. After culturing for 3 days in the differentiation medium, transfection was performed with PMO using 6 μM Endo-Porter. After culturing for 3 days, the medium was changed to a differentiation medium. After culturing for 7 days or 11 days after the addition of PMO, Western blotting was performed in the same manner as in Test Examples 4 and 7 of the present example to detect the dystrophin protein. Samples subjected to electrophoresis are shown in Table 36. As a positive control of dystrophin expression, a lysate of mouse C2C12 cells having been muscle differentiation cultured for 12 days (normal dystrophin control), and a lysate of skeletal muscle of exon 45 to 55 deletion transgenic mouse (exon 45 to 55 deletion dystrophin expression control) were used.

TABLE 36

| Condition | Sample | Collection date |
|---|---|---|
| 1 | Normal dystrophin control | |
| 2 | Exon 45 to 55 deletion | |
| | dystrophin expression control | |
| 3 | No PMO added | 7 days after |
| 4 | 30 μ M PMO No. 6 + 30 μ M | PMO addition |
| | PMO No. 7 +30 μ M PMO No. 8 | |
| 5 | 30 μ M PMO No. 6 + 30 μ M | |
| | PMO No. 8 | |
| 6 | No PMO added | 11 days after |
| 7 | 30 μ M PMO No. 6 + 30 μ M | PMO addition |
| | PMO No. 7 +30 μ M PMO No. 8 | |
| 8 | 30 μ M PMO No. 6 + 30 μ M | |
| | PMO No. 8 | |
| 9 | 30 p M PMO No. 6 | |

### Results

[0754] The results are shown in FIG. 38. In the negative control (conditions 3 and 6), the band was not confirmed in the same position (FIG. 38: arrowhead) as the band of exon 45 to 55 deletion dystrophin-positive control (condition 2), but in the samples transfected with a cocktail of PMOs (conditions 4, 5, 7, and 8), expression of the dystrophin protein corresponding to exon 45 to 55 skipping was confirmed (FIG. 38: arrowhead).

### Test Example 16

### Assay of Exon 45 to 55 Multi-Exon Skipping in DMD Patient-Derived Myoblasts with Exon 51 Deletion—(9): Restoration of Dystrophin Protein by Multi-Exon Skipping—(2)

### Procedures

[0755] DMD patient-derived myoblasts with exon 51 deletion (CD56-positive and CD82-positive) prepared in the same manner as in Test Examples 8 to 15 were seeded in a collagen I coat microplate 24-well (manufactured by AGC Techno Glass Co., Ltd.) coated with Corning (R) Matrigel Basement Membrane Matrix at 2.0×10⁵/well, and cultured for 1 day under conditions of 37° C. and 5% CO₂ in 1 mL of a growth medium for DMD patient-derived myoblasts. On the next day of the seeding, the medium was changed from the growth medium for DMD patient-derived myoblasts to a differentiation medium for DMD patient-derived myoblasts. After culturing for 7 days in the differentiation medium, transfection was performed with PMO using 6 μM Endo-Porter. The PMOs used here are shown in Table 37 below.

TABLE 37

| PMO | | SEQ |
|---|---|---|
| No. | Base sequence of PMO (5′ to 3′) | ID NO: |
| 6 | TGACAACAGTTTGCCGCTGCCCGATTAA | 1201, 151 |
| 7 | TTTTCATTCCTATTAGATCTGTCG | 3082 |
| 8 | AAAGCAGCCTCTCGCTCACTCACCCTGC | 4950 |
| 14 | CAATGCCATCCTGGAGTTCCTGGATTAA | 1180, 151 |
| 21 | AGTCTGCTAAAATGTTTTCATTCC | 3096 |
| 33 | TGTTGCAGTAATCTATGAGTTTCTTCCA | 4977 |

[0756] After culturing for another 3 days, the medium was changed to a differentiation medium. After culturing for 7 days after the addition of PMO, Western blotting was performed in the same manner as in Test Examples 4, 7, and 15 of the present example to detect the dystrophin protein. Samples subjected to the electrophoresis are shown in Table 38 below.

TABLE 38

| Condition | Sample |
|---|---|
| 1 | Normal dystrophin control |
| 2 | Exon 45 to 55 deletion |
| | dystrophin expression control |
| 3 | No PMO added |
| 4 | 30 μ M PMO No. 14 + 30 μ M |
| | PMO No. 8 |
| 5 | 20 μ M PMO No. 14 + 20 μ M |
| | PMO No. 7 + 20 μ M PMO No. 8 |
| 6 | 30 μ M PMO No. 6 + 30 μ M |
| | PMO No. 33 |
| 7 | 20 μ M PMO No. 6 + 20 μ M |
| | PMO No. 21 + 20 μ M PMO No. 33 |
| 8 | 20 μ M PMO No. 14 + 20 μ M |
| | PMO No. 21 + 20 μ M PMO No. 33 |

### Results

[0757] The results are shown in FIG. 39.

[0758] In the negative control (condition 3), the band was not confirmed in the same position as the band of exon 45 to 55 deletion dystrophin-positive control (condition 2), but in the samples transfected with a cocktail of PMOs (conditions 4, 5, and 6), expression of the dystrophin protein corresponding to exon 45 to 55 skipping was confirmed (FIG. 39: arrowhead).

The application's sequence listing, which the Patent Office published only in electronic form, follows.

SEQUENCE LISTING (5113 sequences)

SEQ ID NO: 1 - DNA, 1 bp, Homo Sapiens
c

SEQ ID NO: 2 - DNA, 1 bp, Homo Sapiens
t

SEQ ID NO: 3 - DNA, 1 bp, Homo Sapiens
a

SEQ ID NO: 4 - DNA, 1 bp, Homo Sapiens
a

SEQ ID NO: 5 - DNA, 1 bp, Homo Sapiens
t

SEQ ID NO: 6 - DNA, 1 bp, Homo Sapiens
t

SEQ ID NO: 7 - DNA, 2 bp, Homo Sapiens
ct

SEQ ID NO: 8 - DNA, 2 bp, Homo Sapiens
tc

SEQ ID NO: 9 - DNA, 2 bp, Homo Sapiens
at

SEQ ID NO: 10 - DNA, 2 bp, Homo Sapiens
aa

SEQ ID NO: 11 - DNA, 2 bp, Homo Sapiens
ta

SEQ ID NO: 12 - DNA, 2 bp, Homo Sapiens
tt

SEQ ID NO: 13 - DNA, 2 bp, Homo Sapiens
tt

SEQ ID NO: 14 - DNA, 3 bp, Homo Sapiens
ctt

SEQ ID NO: 15 - DNA, 3 bp, Homo Sapiens
tct

SEQ ID NO: 16 - DNA, 3 bp, Homo Sapiens
atc

SEQ ID NO: 17 - DNA, 3 bp, Homo Sapiens
aat

SEQ ID NO: 18 - DNA, 3 bp, Homo Sapiens
taa

SEQ ID NO: 19 - DNA, 3 bp, Homo Sapiens
tta

SEQ ID NO: 20 - DNA, 3 bp, Homo Sapiens
ttt

SEQ ID NO: 21 - DNA, 3 bp, Homo Sapiens
gtt

SEQ ID NO: 22 - DNA, 4 bp, Homo Sapiens
cttt

SEQ ID NO: 23 - DNA, 4 bp, Homo Sapiens
tctt

SEQ ID NO: 24 - DNA, 4 bp, Homo Sapiens
atct

SEQ ID NO: 25 - DNA, 4 bp, Homo Sapiens
aatc

SEQ ID NO: 26 - DNA, 4 bp, Homo Sapiens
taat

SEQ ID NO: 27 - DNA, 4 bp, Homo Sapiens
ttaa

SEQ ID NO: 28 - DNA, 4 bp, Homo Sapiens
ttta

SEQ ID NO: 29 - DNA, 4 bp, Homo Sapiens
gttt

SEQ ID NO: 30 - DNA, 4 bp, Homo Sapiens
tgtt

SEQ ID NO: 31 - DNA, 5 bp, Homo Sapiens
ctttt

SEQ ID NO: 32 - DNA, 5 bp, Homo Sapiens
tcttt

SEQ ID NO: 33 - DNA, 5 bp, Homo Sapiens
atctt

SEQ ID NO: 34 - DNA, 5 bp, Homo Sapiens
aatct

SEQ ID NO: 35 - DNA, 5 bp, Homo Sapiens
taatc

SEQ ID NO: 36 - DNA, 5 bp, Homo Sapiens
ttaat

SEQ ID NO: 37 - DNA, 5 bp, Homo Sapiens
tttaa

SEQ ID NO: 38 - DNA, 5 bp, Homo Sapiens
gttta

SEQ ID NO: 39 - DNA, 5 bp, Homo Sapiens
tgttt

SEQ ID NO: 40 - DNA, 5 bp, Homo Sapiens
ctgtt

SEQ ID NO: 41 - DNA, 6 bp, Homo Sapiens
cttttc

SEQ ID NO: 42 - DNA, 6 bp, Homo Sapiens
tctttt

SEQ ID NO: 43 - DNA, 6 bp, Homo Sapiens
atcttt

SEQ ID NO: 44 - DNA, 6 bp, Homo Sapiens
aatctt

SEQ ID NO: 45 - DNA, 6 bp, Homo Sapiens
taatct

SEQ ID NO: 46 - DNA, 6 bp, Homo Sapiens
ttaatc

SEQ ID NO: 47 - DNA, 6 bp, Homo Sapiens
tttaat

SEQ ID NO: 48 - DNA, 6 bp, Homo Sapiens
gtttaa

SEQ ID NO: 49 - DNA, 6 bp, Homo Sapiens
tgttta

SEQ ID NO: 50 - DNA, 6 bp, Homo Sapiens
ctgttt

SEQ ID NO: 51 - DNA, 6 bp, Homo Sapiens
actgtt

SEQ ID NO: 52 - DNA, 7 bp, Homo Sapiens
cttttct

SEQ ID NO: 53 - DNA, 7 bp, Homo Sapiens
tcttttc

SEQ ID NO: 54 - DNA, 7 bp, Homo Sapiens
atctttt

SEQ ID NO: 55 - DNA, 7 bp, Homo Sapiens
aatcttt

SEQ ID NO: 56 - DNA, 7 bp, Homo Sapiens
taatctt

SEQ ID NO: 57 - DNA, 7 bp, Homo Sapiens
ttaatct

SEQ ID NO: 58 - DNA, 7 bp, Homo Sapiens
tttaatc

SEQ ID NO: 59 - DNA, 7 bp, Homo Sapiens
gtttaat

SEQ ID NO: 60 - DNA, 7 bp, Homo Sapiens
tgtttaa

SEQ ID NO: 61 - DNA, 7 bp, Homo Sapiens
ctgttta

SEQ ID NO: 62 - DNA, 7 bp, Homo Sapiens
actgttt

SEQ ID NO: 63 - DNA, 7 bp, Homo Sapiens
cactgtt

SEQ ID NO: 64 - DNA, 8 bp, Homo Sapiens
cttttctc

SEQ ID NO: 65 - DNA, 8 bp, Homo Sapiens
tcttttct

SEQ ID NO: 66 - DNA, 8 bp, Homo Sapiens
atcttttc

SEQ ID NO: 67 - DNA, 8 bp, Homo Sapiens
aatctttt

SEQ ID NO: 68 - DNA, 8 bp, Homo Sapiens
taatcttt

SEQ ID NO: 69 - DNA, 8 bp, Homo Sapiens
ttaatctt

SEQ ID NO: 70 - DNA, 8 bp, Homo Sapiens
tttaatct

SEQ ID NO: 71 - DNA, 8 bp, Homo Sapiens
gtttaatc

SEQ ID NO: 72 - DNA, 8 bp, Homo Sapiens
tgtttaat

SEQ ID NO: 73 - DNA, 8 bp, Homo Sapiens
ctgtttaa

SEQ ID NO: 74 - DNA, 8 bp, Homo Sapiens
actgttta

SEQ ID NO: 75 - DNA, 8 bp, Homo Sapiens
cactgttt

SEQ ID NO: 76 - DNA, 8 bp, Homo Sapiens
acactgtt

SEQ ID NO: 77 - DNA, 9 bp, Homo Sapiens
cttttctca

SEQ ID NO: 78 - DNA, 9 bp, Homo Sapiens
tcttttctc

SEQ ID NO: 79 - DNA, 9 bp, Homo Sapiens
atcttttct

SEQ ID NO: 80 - DNA, 9 bp, Homo Sapiens
aatcttttc

SEQ ID NO: 81 - DNA, 9 bp, Homo Sapiens
taatctttt

SEQ ID NO: 82 - DNA, 9 bp, Homo Sapiens
ttaatcttt

SEQ ID NO: 83 - DNA, 9 bp, Homo Sapiens
tttaatctt

SEQ ID NO: 84 - DNA, 9 bp, Homo Sapiens
gtttaatct

SEQ ID NO: 85 - DNA, 9 bp, Homo Sapiens
tgtttaatc

SEQ ID NO: 86 - DNA, 9 bp, Homo Sapiens
ctgtttaat

SEQ ID NO: 87 - DNA, 9 bp, Homo Sapiens
actgtttaa

SEQ ID NO: 88 - DNA, 9 bp, Homo Sapiens
cactgttta

SEQ ID NO: 89 - DNA, 9 bp, Homo Sapiens
acactgttt

SEQ ID NO: 90 - DNA, 9 bp, Homo Sapiens
cacactgtt

SEQ ID NO: 91 - DNA, 10 bp, Homo Sapiens
cttttctcaa

SEQ ID NO: 92 - DNA, 10 bp, Homo Sapiens
tcttttctca

SEQ ID NO: 93 - DNA, 10 bp, Homo Sapiens
atcttttctc

SEQ ID NO: 94 - DNA, 10 bp, Homo Sapiens
aatcttttct

SEQ ID NO: 95 - DNA, 10 bp, Homo Sapiens
taatcttttc

SEQ ID NO: 96 - DNA, 10 bp, Homo Sapiens
ttaatctttt

SEQ ID NO: 97 - DNA, 10 bp, Homo Sapiens
tttaatcttt

SEQ ID NO: 98 - DNA, 10 bp, Homo Sapiens
gtttaatctt

SEQ ID NO: 99 - DNA, 10 bp, Homo Sapiens
tgtttaatct

SEQ ID NO: 100 - DNA, 10 bp, Homo Sapiens
ctgtttaatc

SEQ ID NO: 101 - DNA, 10 bp, Homo Sapiens
actgtttaat

SEQ ID NO: 102 - DNA, 10 bp, Homo Sapiens
cactgtttaa

SEQ ID NO: 103 - DNA, 10 bp, Homo Sapiens
acactgttta

SEQ ID NO: 104 - DNA, 10 bp, Homo Sapiens
cacactgttt

SEQ ID NO: 105 - DNA, 10 bp, Homo Sapiens
gcacactgtt

SEQ ID NO: 106 - DNA, 1 bp, Homo Sapiens
g

SEQ ID NO: 107 - DNA, 1 bp, Homo Sapiens
a

SEQ ID NO: 108 - DNA, 1 bp, Homo Sapiens
t

SEQ ID NO: 109 - DNA, 1 bp, Homo Sapiens
t

SEQ ID NO: 110 - DNA, 1 bp, Homo Sapiens
a

SEQ ID NO: 111 - DNA, 1 bp, Homo Sapiens
a

SEQ ID NO: 112 - DNA, 2 bp, Homo Sapiens
ag

SEQ ID NO: 113 - DNA, 2 bp, Homo Sapiens
ga

SEQ ID NO: 114 - DNA, 2 bp, Homo Sapiens
at

SEQ ID NO: 115 - DNA, 2 bp, Homo Sapiens
tt

SEQ ID NO: 116 - DNA, 2 bp, Homo Sapiens
ta

SEQ ID NO: 117 - DNA, 2 bp, Homo Sapiens
aa

SEQ ID NO: 118 - DNA, 2 bp, Homo Sapiens
aa

SEQ ID NO: 119 - DNA, 3 bp, Homo Sapiens
aag

SEQ ID NO: 120 - DNA, 3 bp, Homo Sapiens
aga

SEQ ID NO: 121 - DNA, 3 bp, Homo Sapiens
gat

SEQ ID NO: 122 - DNA, 3 bp, Homo Sapiens
att

SEQ ID NO: 123 - DNA, 3 bp, Homo Sapiens
tta

SEQ ID NO: 124 - DNA, 3 bp, Homo Sapiens
taa

SEQ ID NO: 125 - DNA, 3 bp, Homo Sapiens
aaa

SEQ ID NO: 126 - DNA, 3 bp, Homo Sapiens
aac

SEQ ID NO: 127 - DNA, 4 bp, Homo Sapiens
aaag

SEQ ID NO: 128 - DNA, 4 bp, Homo Sapiens
aaga

SEQ ID NO: 129 - DNA, 4 bp, Homo Sapiens
agat

SEQ ID NO: 130 - DNA, 4 bp, Homo Sapiens
gatt

SEQ ID NO: 131 - DNA, 4 bp, Homo Sapiens
atta

SEQ ID NO: 132 - DNA, 4 bp, Homo Sapiens
ttaa

SEQ ID NO: 133 - DNA, 4 bp, Homo Sapiens
taaa

SEQ ID NO: 134 - DNA, 4 bp, Homo Sapiens
aaac

SEQ ID NO: 135 - DNA, 4 bp, Homo Sapiens
aaca

SEQ ID NO: 136 - DNA, 5 bp, Homo Sapiens
aaaag

SEQ ID NO: 137 - DNA, 5 bp, Homo Sapiens
aaaga

SEQ ID NO: 138 - DNA, 5 bp, Homo Sapiens
aagat

SEQ ID NO: 139 - DNA, 5 bp, Homo Sapiens
agatt

SEQ ID NO: 140 - DNA, 5 bp, Homo Sapiens
gatta

SEQ ID NO: 141 - DNA, 5 bp, Homo Sapiens
attaa

SEQ ID NO: 142 - DNA, 5 bp, Homo Sapiens
ttaaa

SEQ ID NO: 143 - DNA, 5 bp, Homo Sapiens
taaac

SEQ ID NO: 144 - DNA, 5 bp, Homo Sapiens
aaaca

SEQ ID NO: 145 - DNA, 5 bp, Homo Sapiens
aacag

SEQ ID NO: 146 - DNA, 6 bp, Homo Sapiens
gaaaag

SEQ ID NO: 147 - DNA, 6 bp, Homo Sapiens
aaaaga

SEQ ID NO: 148 - DNA, 6 bp, Homo Sapiens
aaagat

SEQ ID NO: 149 - DNA, 6 bp, Homo Sapiens
aagatt

SEQ ID NO: 150 - DNA, 6 bp, Homo Sapiens
agatta

SEQ ID NO: 151 - DNA, 6 bp, Homo Sapiens
gattaa

SEQ ID NO: 152 - DNA, 6 bp, Homo Sapiens
attaaa

SEQ ID NO: 153 - DNA, 6 bp, Homo Sapiens
ttaaac

SEQ ID NO: 154 - DNA, 6 bp, Homo Sapiens
taaaca

SEQ ID NO: 155 - DNA, 6 bp, Homo Sapiens
aaacag

SEQ ID NO: 156 - DNA, 6 bp, Homo Sapiens
aacagt

SEQ ID NO: 157 - DNA, 7 bp, Homo Sapiens
agaaaag

SEQ ID NO: 158 - DNA, 7 bp, Homo Sapiens
gaaaaga

SEQ ID NO: 159 - DNA, 7 bp, Homo Sapiens
aaaagat

SEQ ID NO: 160 - DNA, 7 bp, Homo Sapiens
aaagatt

SEQ ID NO: 161 - DNA, 7 bp, Homo Sapiens
aagatta

SEQ ID NO: 162 - DNA, 7 bp, Homo Sapiens
agattaa

SEQ ID NO: 163 - DNA, 7 bp, Homo Sapiens
gattaaa

SEQ ID NO: 164 - DNA, 7 bp, Homo Sapiens
attaaac

SEQ ID NO: 165 - DNA, 7 bp, Homo Sapiens
ttaaaca

SEQ ID NO: 166 - DNA, 7 bp, Homo Sapiens
taaacag

SEQ ID NO: 167 - DNA, 7 bp, Homo Sapiens
aaacagt

SEQ ID NO: 168 - DNA, 7 bp, Homo Sapiens
aacagtg

SEQ ID NO: 169 - DNA, 8 bp, Homo Sapiens
gagaaaag

SEQ ID NO: 170 - DNA, 8 bp, Homo Sapiens
agaaaaga

SEQ ID NO: 171 - DNA, 8 bp, Homo Sapiens
gaaaagat

SEQ ID NO: 172 - DNA, 8 bp, Homo Sapiens
aaaagatt

SEQ ID NO: 173 - DNA, 8 bp, Homo Sapiens
aaagatta

SEQ ID NO: 174 - DNA, 8 bp, Homo Sapiens
aagattaa

SEQ ID NO: 175 - DNA, 8 bp, Homo Sapiens
agattaaa

SEQ ID NO: 176 - DNA, 8 bp, Homo Sapiens
gattaaac

SEQ ID NO: 177 - DNA, 8 bp, Homo Sapiens
attaaaca

SEQ ID NO: 178 - DNA, 8 bp, Homo Sapiens
ttaaacag

SEQ ID NO: 179 - DNA, 8 bp, Homo Sapiens
taaacagt

SEQ ID NO: 180 - DNA, 8 bp, Homo Sapiens
aaacagtg

SEQ ID NO: 181 - DNA, 8 bp, Homo Sapiens
aacagtgt

SEQ ID NO: 182 - DNA, 9 bp, Homo Sapiens
tgagaaaag

SEQ ID NO: 183 - DNA, 9 bp, Homo Sapiens
gagaaaaga

SEQ ID NO: 184 - DNA, 9 bp, Homo Sapiens
agaaaagat

SEQ ID NO: 185 - DNA, 9 bp, Homo Sapiens
gaaaagatt

SEQ ID NO: 186 - DNA, 9 bp, Homo Sapiens
aaaagatta

SEQ ID NO: 187 - DNA, 9 bp, Homo Sapiens
aaagattaa

SEQ ID NO: 188 - DNA, 9 bp, Homo Sapiens
aagattaaa

SEQ ID NO: 189 - DNA, 9 bp, Homo Sapiens
agattaaac

SEQ ID NO: 190 - DNA, 9 bp, Homo Sapiens
gattaaaca

SEQ ID NO: 191 - DNA, 9 bp, Homo Sapiens
attaaacag

SEQ ID NO: 192 - DNA, 9 bp, Homo Sapiens
ttaaacagt

SEQ ID NO: 193 - DNA, 9 bp, Homo Sapiens
taaacagtg

SEQ ID NO: 194 - DNA, 9 bp, Homo Sapiens
aaacagtgt

SEQ ID NO: 195 - DNA, 9 bp, Homo Sapiens
aacagtgtg

SEQ ID NO: 196 - DNA, 10 bp, Homo Sapiens
ttgagaaaag

SEQ ID NO: 197 - DNA, 10 bp, Homo Sapiens
tgagaaaaga

SEQ ID NO: 198 - DNA, 10 bp, Homo Sapiens
gagaaaagat

SEQ ID NO: 199 - DNA, 10 bp, Homo Sapiens
agaaaagatt

SEQ ID NO: 200 - DNA, 10 bp, Homo Sapiens
gaaaagatta

SEQ ID NO: 201 - DNA, 10 bp, Homo Sapiens
aaaagattaa

SEQ ID NO: 202 - DNA, 10 bp, Homo Sapiens
aaagattaaa

SEQ ID NO: 203 - DNA, 10 bp, Homo Sapiens
aagattaaac

SEQ ID NO: 204 - DNA, 10 bp, Homo Sapiens
agattaaaca

SEQ ID NO: 205 - DNA, 10 bp, Homo Sapiens
gattaaacag

SEQ ID NO: 206 - DNA, 10 bp, Homo Sapiens
attaaacagt

SEQ ID NO: 207 - DNA, 10 bp, Homo Sapiens
ttaaacagtg

SEQ ID NO: 208 - DNA, 10 bp, Homo Sapiens
taaacagtgt

SEQ ID NO: 209 - DNA, 10 bp, Homo Sapiens
aaacagtgtg

SEQ ID NO: 210 - DNA, 10 bp, Homo Sapiens
aacagtgtgc

SEQ ID NO: 211 - DNA, 15 bp, Homo Sapiens
tccaggatggcattg

SEQ ID NO: 212 - DNA, 15 bp, Homo Sapiens
ccaggatggcattgg

SEQ ID NO: 213 - DNA, 15 bp, Homo Sapiens
caggatggcattggg

SEQ ID NO: 214 - DNA, 15 bp, Homo Sapiens
aggatggcattgggc

SEQ ID NO: 215 - DNA, 15 bp, Homo Sapiens
ggatggcattgggca

SEQ ID NO: 216 - DNA, 15 bp, Homo Sapiens
gatggcattgggcag

SEQ ID NO: 217 - DNA, 15 bp, Homo Sapiens
atggcattgggcagc

SEQ ID NO: 218 - DNA, 15 bp, Homo Sapiens
tggcattgggcagcg

SEQ ID NO: 219 - DNA, 15 bp, Homo Sapiens
ggcattgggcagcgg

SEQ ID NO: 220 - DNA, 15 bp, Homo Sapiens
gcattgggcagcggc

SEQ ID NO: 221 - DNA, 15 bp, Homo Sapiens
cattgggcagcggca

SEQ ID NO: 222 - DNA, 15 bp, Homo Sapiens
attgggcagcggcaa

SEQ ID NO: 223 - DNA, 15 bp, Homo Sapiens
ttgggcagcggcaaa

SEQ ID NO: 224 - DNA, 15 bp, Homo Sapiens
tgggcagcggcaaac

SEQ ID NO: 225 - DNA, 15 bp, Homo Sapiens
gggcagcggcaaact

SEQ ID NO: 226 - DNA, 15 bp, Homo Sapiens
ggcagcggcaaactg

SEQ ID NO: 227 - DNA, 15 bp, Homo Sapiens
gcagcggcaaactgt

SEQ ID NO: 228 - DNA, 15 bp, Homo Sapiens
cagcggcaaactgtt

SEQ ID NO: 229 - DNA, 15 bp, Homo Sapiens
agcggcaaactgttg

SEQ ID NO: 230 - DNA, 15 bp, Homo Sapiens
gcggcaaactgttgt

SEQ ID NO: 231 - DNA, 15 bp, Homo Sapiens
cggcaaactgttgtc

SEQ ID NO: 232 - DNA, 15 bp, Homo Sapiens
ggcaaactgttgtca

SEQ ID NO: 233 - DNA, 15 bp, Homo Sapiens
gcaaactgttgtcag

SEQ ID NO: 234 - DNA, 15 bp, Homo Sapiens
caaactgttgtcaga

SEQ ID NO: 235 - DNA, 15 bp, Homo Sapiens
aaactgttgtcagaa

SEQ ID NO: 236 - DNA, 15 bp, Homo Sapiens
aactgttgtcagaac

SEQ ID NO: 237 - DNA, 15 bp, Homo Sapiens
actgttgtcagaaca

SEQ ID NO: 238 - DNA, 15 bp, Homo Sapiens
ctgttgtcagaacat

SEQ ID NO: 239 - DNA, 15 bp, Homo Sapiens
tgttgtcagaacatt

SEQ ID NO: 240 - DNA, 15 bp, Homo Sapiens
gttgtcagaacattg

SEQ ID NO: 241 - DNA, 15 bp, Homo Sapiens
ttgtcagaacattga

SEQ ID NO: 242 - DNA, 15 bp, Homo Sapiens
tgtcagaacattgaa

SEQ ID NO: 243 - DNA, 15 bp, Homo Sapiens
gtcagaacattgaat

SEQ ID NO: 244 - DNA, 15 bp, Homo Sapiens
tcagaacattgaatg

SEQ ID NO: 245 - DNA, 15 bp, Homo Sapiens
cagaacattgaatgc

SEQ ID NO: 246 - DNA, 15 bp, Homo Sapiens
agaacattgaatgca

SEQ ID NO: 247 - DNA, 16 bp, Homo Sapiens
ctccaggatggcattg

SEQ ID NO: 248 - DNA, 16 bp, Homo Sapiens
tccaggatggcattgg

SEQ ID NO: 249 - DNA, 16 bp, Homo Sapiens
ccaggatggcattggg

SEQ ID NO: 250 - DNA, 16 bp, Homo Sapiens
caggatggcattgggc

SEQ ID NO: 251 - DNA, 16 bp, Homo Sapiens
aggatggcattgggca

SEQ ID NO: 252 - DNA, 16 bp, Homo Sapiens
ggatggcattgggcag

SEQ ID NO: 253 - DNA, 16 bp, Homo Sapiens
gatggcattgggcagc

SEQ ID NO: 254 - DNA, 16 bp, Homo Sapiens
atggcattgggcagcg

SEQ ID NO: 255 - DNA, 16 bp, Homo Sapiens
tggcattgggcagcgg

SEQ ID NO: 256 - DNA, 16 bp, Homo Sapiens
ggcattgggcagcggc

SEQ ID NO: 257 - DNA, 16 bp, Homo Sapiens
gcattgggcagcggca

SEQ ID NO: 258 - DNA, 16 bp, Homo Sapiens
cattgggcagcggcaa

SEQ ID NO: 259 - DNA, 16 bp, Homo Sapiens
attgggcagcggcaaa

SEQ ID NO: 260 - DNA, 16 bp, Homo Sapiens
ttgggcagcggcaaac

SEQ ID NO: 261 - DNA, 16 bp, Homo Sapiens
tgggcagcggcaaact

SEQ ID NO: 262 - DNA, 16 bp, Homo Sapiens
gggcagcggcaaactg

SEQ ID NO: 263 - DNA, 16 bp, Homo Sapiens
ggcagcggcaaactgt

SEQ ID NO: 264 - DNA, 16 bp, Homo Sapiens
gcagcggcaaactgtt

SEQ ID NO: 265 - DNA, 16 bp, Homo Sapiens
cagcggcaaactgttg

SEQ ID NO: 266 - DNA, 16 bp, Homo Sapiens
agcggcaaactgttgt

SEQ ID NO: 267 - DNA, 16 bp, Homo Sapiens
gcggcaaactgttgtc

SEQ ID NO: 268 - DNA, 16 bp, Homo Sapiens
cggcaaactgttgtca

SEQ ID NO: 269 - DNA, 16 bp, Homo Sapiens
ggcaaactgttgtcag

SEQ ID NO: 270 - DNA, 16 bp, Homo Sapiens
gcaaactgttgtcaga

SEQ ID NO: 271 - DNA, 16 bp, Homo Sapiens
caaactgttgtcagaa

SEQ ID NO: 272 - DNA, 16 bp, Homo Sapiens
aaactgttgtcagaac

SEQ ID NO: 273 - DNA, 16 bp, Homo Sapiens
aactgttgtcagaaca

SEQ ID NO: 274 - DNA, 16 bp, Homo Sapiens
actgttgtcagaacat

SEQ ID NO: 275 - DNA, 16 bp, Homo Sapiens
ctgttgtcagaacatt

SEQ ID NO: 276 - DNA, 16 bp, Homo Sapiens
tgttgtcagaacattg

SEQ ID NO: 277 - DNA, 16 bp, Homo Sapiens
gttgtcagaacattga

SEQ ID NO: 278 - DNA, 16 bp, Homo Sapiens
ttgtcagaacattgaa

SEQ ID NO: 279 - DNA, 16 bp, Homo Sapiens
tgtcagaacattgaat

SEQ ID NO: 280 - DNA, 16 bp, Homo Sapiens
gtcagaacattgaatg

SEQ ID NO: 281 - DNA, 16 bp, Homo Sapiens
tcagaacattgaatgc

SEQ ID NO: 282 - DNA, 16 bp, Homo Sapiens
cagaacattgaatgca

SEQ ID NO: 283 - DNA, 16 bp, Homo Sapiens
agaacattgaatgcaa

SEQ ID NO: 284 - DNA, 17 bp, Homo Sapiens
actccaggatggcattg

SEQ ID NO: 285 - DNA, 17 bp, Homo Sapiens
ctccaggatggcattgg

SEQ ID NO: 286 - DNA, 17 bp, Homo Sapiens
tccaggatggcattggg

SEQ ID NO: 287 - DNA, 17 bp, Homo Sapiens
ccaggatggcattgggc

SEQ ID NO: 288 - DNA, 17 bp, Homo Sapiens
caggatggcattgggca

SEQ ID NO: 289 - DNA, 17 bp, Homo Sapiens
aggatggcattgggcag

SEQ ID NO: 290 - DNA, 17 bp, Homo Sapiens
ggatggcattgggcagc

SEQ ID NO: 291 - DNA, 17 bp, Homo Sapiens
gatggcattgggcagcg

SEQ ID NO: 292 - DNA, 17 bp, Homo Sapiens
atggcattgggcagcgg

SEQ ID NO: 293 - DNA, 17 bp, Homo Sapiens
tggcattgggcagcggc

SEQ ID NO: 294 - DNA, 17 bp, Homo Sapiens
ggcattgggcagcggca

SEQ ID NO: 295 - DNA, 17 bp, Homo Sapiens
gcattgggcagcggcaa

SEQ ID NO: 296 - DNA, 17 bp, Homo Sapiens
cattgggcagcggcaaa

SEQ ID NO: 297 - DNA, 17 bp, Homo Sapiens
attgggcagcggcaaac

SEQ ID NO: 298 - DNA, 17 bp, Homo Sapiens
ttgggcagcggcaaact

SEQ ID NO: 299 - DNA, 17 bp, Homo Sapiens
tgggcagcggcaaactg

SEQ ID NO: 300 - DNA, 17 bp, Homo Sapiens
gggcagcggcaaactgt

SEQ ID NO: 301 - DNA, 17 bp, Homo Sapiens
ggcagcggcaaactgtt

SEQ ID NO: 302 - DNA, 17 bp, Homo Sapiens
gcagcggcaaactgttg

SEQ ID NO: 303 - DNA, 17 bp, Homo Sapiens
cagcggcaaactgttgt

SEQ ID NO: 304 - DNA, 17 bp, Homo Sapiens
agcggcaaactgttgtc

SEQ ID NO: 305 - DNA, 17 bp, Homo Sapiens
gcggcaaactgttgtca

SEQ ID NO: 306 - DNA, 17 bp, Homo Sapiens
cggcaaactgttgtcag

SEQ ID NO: 307 - DNA, 17 bp, Homo Sapiens
ggcaaactgttgtcaga

SEQ ID NO: 308 - DNA, 17 bp, Homo Sapiens
gcaaactgttgtcagaa

SEQ ID NO: 309 - DNA, 17 bp, Homo Sapiens
caaactgttgtcagaac

SEQ ID NO: 310 - DNA, 17 bp, Homo Sapiens
aaactgttgtcagaaca

SEQ ID NO: 311 - DNA, 17 bp, Homo Sapiens
aactgttgtcagaacat

SEQ ID NO: 312 - DNA, 17 bp, Homo Sapiens
actgttgtcagaacatt

SEQ ID NO: 313 - DNA, 17 bp, Homo Sapiens
ctgttgtcagaacattg

SEQ ID NO: 314 - DNA, 17 bp, Homo Sapiens
tgttgtcagaacattga

SEQ ID NO: 315 - DNA, 17 bp, Homo Sapiens
gttgtcagaacattgaa

SEQ ID NO: 316 - DNA, 17 bp, Homo Sapiens
ttgtcagaacattgaat

SEQ ID NO: 317 - DNA, 17 bp, Homo Sapiens
tgtcagaacattgaatg

SEQ ID NO: 318 - DNA, 17 bp, Homo Sapiens
gtcagaacattgaatgc

SEQ ID NO: 319 - DNA, 17 bp, Homo Sapiens
tcagaacattgaatgca

SEQ ID NO: 320 - DNA, 17 bp, Homo Sapiens
cagaacattgaatgcaa

SEQ ID NO: 321 - DNA, 17 bp, Homo Sapiens
agaacattgaatgcaac

SEQ ID NO: 322 - DNA, 18 bp, Homo Sapiens
aactccaggatggcattg

SEQ ID NO: 323 - DNA, 18 bp, Homo Sapiens
actccaggatggcattgg

SEQ ID NO: 324 - DNA, 18 bp, Homo Sapiens
ctccaggatggcattggg

SEQ ID NO: 325 - DNA, 18 bp, Homo Sapiens
tccaggatggcattgggc

SEQ ID NO: 326 - DNA, 18 bp, Homo Sapiens
ccaggatggcattgggca

SEQ ID NO: 327 - DNA, 18 bp, Homo Sapiens
caggatggcattgggcag

SEQ ID NO: 328 - DNA, 18 bp, Homo Sapiens
aggatggcattgggcagc

SEQ ID NO: 329 - DNA, 18 bp, Homo Sapiens
ggatggcattgggcagcg

SEQ ID NO: 330 - DNA, 18 bp, Homo Sapiens
gatggcattgggcagcgg

SEQ ID NO: 331 - DNA, 18 bp, Homo Sapiens
atggcattgggcagcggc

SEQ ID NO: 332 - DNA, 18 bp, Homo Sapiens
tggcattgggcagcggca

SEQ ID NO: 333 - DNA, 18 bp, Homo Sapiens
ggcattgggcagcggcaa

SEQ ID NO: 334 - DNA, 18 bp, Homo Sapiens
gcattgggcagcggcaaa

SEQ ID NO: 335 - DNA, 18 bp, Homo Sapiens
cattgggcagcggcaaac

SEQ ID NO: 336 - DNA, 18 bp, Homo Sapiens
attgggcagcggcaaact

SEQ ID NO: 337 - DNA, 18 bp, Homo Sapiens
ttgggcagcggcaaactg

SEQ ID NO: 338 - DNA, 18 bp, Homo Sapiens
tgggcagcggcaaactgt

SEQ ID NO: 339 - DNA, 18 bp, Homo Sapiens
gggcagcggcaaactgtt

SEQ ID NO: 340 - DNA, 18 bp, Homo Sapiens
ggcagcggcaaactgttg

SEQ ID NO: 341 - DNA, 18 bp, Homo Sapiens
gcagcggcaaactgttgt

SEQ ID NO: 342 - DNA, 18 bp, Homo Sapiens
cagcggcaaactgttgtc

SEQ ID NO: 343 - DNA, 18 bp, Homo Sapiens
agcggcaaactgttgtca

SEQ ID NO: 344 - DNA, 18 bp, Homo Sapiens
gcggcaaactgttgtcag

SEQ ID NO: 345 - DNA, 18 bp, Homo Sapiens
cggcaaactgttgtcaga

SEQ ID NO: 346 - DNA, 18 bp, Homo Sapiens
ggcaaactgttgtcagaa

SEQ ID NO: 347 - DNA, 18 bp, Homo Sapiens
gcaaactgttgtcagaac

SEQ ID NO: 348 - DNA, 18 bp, Homo Sapiens
caaactgttgtcagaaca

SEQ ID NO: 349 - DNA, 18 bp, Homo Sapiens
aaactgttgtcagaacat

SEQ ID NO: 350 - DNA, 18 bp, Homo Sapiens
aactgttgtcagaacatt

SEQ ID NO: 351 - DNA, 18 bp, Homo Sapiens
actgttgtcagaacattg

SEQ ID NO: 352 - DNA, 18 bp, Homo Sapiens
ctgttgtcagaacattga

SEQ ID NO: 353 - DNA, 18 bp, Homo Sapiens
tgttgtcagaacattgaa

SEQ ID NO: 354 - DNA, 18 bp, Homo Sapiens
gttgtcagaacattgaat

SEQ ID NO: 355 - DNA, 18 bp, Homo Sapiens
ttgtcagaacattgaatg

SEQ ID NO: 356 - DNA, 18 bp, Homo Sapiens
tgtcagaacattgaatgc

SEQ ID NO: 357 - DNA, 18 bp, Homo Sapiens
gtcagaacattgaatgca

SEQ ID NO: 358 - DNA, 18 bp, Homo Sapiens
tcagaacattgaatgcaa

SEQ ID NO: 359 - DNA, 18 bp, Homo Sapiens
cagaacattgaatgcaac

SEQ ID NO: 360 - DNA, 18 bp, Homo Sapiens
agaacattgaatgcaact

SEQ ID NO: 361 - DNA, 19 bp, Homo Sapiens
gaactccaggatggcattg

SEQ ID NO: 362 - DNA, 19 bp, Homo Sapiens
aactccaggatggcattgg

SEQ ID NO: 363 - DNA, 19 bp, Homo Sapiens
actccaggatggcattggg

SEQ ID NO: 364 - DNA, 19 bp, Homo Sapiens
ctccaggatggcattgggc

SEQ ID NO: 365 - DNA, 19 bp, Homo Sapiens
tccaggatggcattgggca

SEQ ID NO: 366 - DNA, 19 bp, Homo Sapiens
ccaggatggcattgggcag

SEQ ID NO: 367 - DNA, 19 bp, Homo Sapiens
caggatggcattgggcagc

SEQ ID NO: 368 - DNA, 19 bp, Homo Sapiens
aggatggcattgggcagcg

SEQ ID NO: 369 - DNA, 19 bp, Homo Sapiens
ggatggcattgggcagcgg

SEQ ID NO: 370 - DNA, 19 bp, Homo Sapiens
gatggcattgggcagcggc

SEQ ID NO: 371 - DNA, 19 bp, Homo Sapiens
atggcattgggcagcggca

SEQ ID NO: 372 - DNA, 19 bp, Homo Sapiens
tggcattgggcagcggcaa

SEQ ID NO: 373 - DNA, 19 bp, Homo Sapiens
ggcattgggcagcggcaaa

SEQ ID NO: 374 - DNA, 19 bp, Homo Sapiens
gcattgggcagcggcaaac

SEQ ID NO: 375 - DNA, 19 bp, Homo Sapiens
cattgggcagcggcaaact

SEQ ID NO: 376 - DNA, 19 bp, Homo Sapiens
attgggcagcggcaaactg

SEQ ID NO: 377 - DNA, 19 bp, Homo Sapiens
ttgggcagcggcaaactgt

SEQ ID NO: 378 - DNA, 19 bp, Homo Sapiens
tgggcagcggcaaactgtt

SEQ ID NO: 379 - DNA, 19 bp, Homo Sapiens
gggcagcggcaaactgttg

SEQ ID NO: 380 - DNA, 19 bp, Homo Sapiens
ggcagcggcaaactgttgt

SEQ ID NO: 381 - DNA, 19 bp, Homo Sapiens
gcagcggcaaactgttgtc

SEQ ID NO: 382 - DNA, 19 bp, Homo Sapiens
cagcggcaaactgttgtca

SEQ ID NO: 383 - DNA, 19 bp, Homo Sapiens
agcggcaaactgttgtcag

SEQ ID NO: 384 - DNA, 19 bp, Homo Sapiens
gcggcaaactgttgtcaga

SEQ ID NO: 385 - DNA, 19 bp, Homo Sapiens
cggcaaactgttgtcagaa

SEQ ID NO: 386 - DNA, 19 bp, Homo Sapiens
ggcaaactgttgtcagaac

SEQ ID NO: 387 - DNA, 19 bp, Homo Sapiens
gcaaactgttgtcagaaca

SEQ ID NO: 388 - DNA, 19 bp, Homo Sapiens
caaactgttgtcagaacat

SEQ ID NO: 389 - DNA, 19 bp, Homo Sapiens
aaactgttgtcagaacatt

SEQ ID NO: 390 - DNA, 19 bp, Homo Sapiens
aactgttgtcagaacattg

SEQ ID NO: 391 - DNA, 19 bp, Homo Sapiens
actgttgtcagaacattga

SEQ ID NO: 392 - DNA, 19 bp, Homo Sapiens
ctgttgtcagaacattgaa

SEQ ID NO: 393 - DNA, 19 bp, Homo Sapiens
tgttgtcagaacattgaat

SEQ ID NO: 394 - DNA, 19 bp, Homo Sapiens
gttgtcagaacattgaatg

SEQ ID NO: 395 - DNA, 19 bp, Homo Sapiens
ttgtcagaacattgaatgc

SEQ ID NO: 396 - DNA, 19 bp, Homo Sapiens
tgtcagaacattgaatgca

SEQ ID NO: 397 - DNA, 19 bp, Homo Sapiens
gtcagaacattgaatgcaa

SEQ ID NO: 398 - DNA, 19 bp, Homo Sapiens
tcagaacattgaatgcaac

SEQ ID NO: 399 - DNA, 19 bp, Homo Sapiens
cagaacattgaatgcaact

SEQ ID NO: 400 - DNA, 19 bp, Homo Sapiens
agaacattgaatgcaactg

SEQ ID NO: 401 - DNA, 20 bp, Homo Sapiens
ggaactccaggatggcattg

SEQ ID NO: 402 - DNA, 20 bp, Homo Sapiens
gaactccaggatggcattgg

SEQ ID NO: 403 - DNA, 20 bp, Homo Sapiens
aactccaggatggcattggg

SEQ ID NO: 404 - DNA, 20 bp, Homo Sapiens
actccaggatggcattgggc

SEQ ID NO: 405 - DNA, 20 bp, Homo Sapiens
ctccaggatggcattgggca

SEQ ID NO: 406 - DNA, 20 bp, Homo Sapiens
tccaggatggcattgggcag

SEQ ID NO: 407 - DNA, 20 bp, Homo Sapiens
ccaggatggcattgggcagc

SEQ ID NO: 408 - DNA, 20 bp, Homo Sapiens
caggatggcattgggcagcg

SEQ ID NO: 409 - DNA, 20 bp, Homo Sapiens
aggatggcattgggcagcgg

SEQ ID NO: 410 - DNA, 20 bp, Homo Sapiens
ggatggcattgggcagcggc

SEQ ID NO: 411 - DNA, 20 bp, Homo Sapiens
gatggcattgggcagcggca

SEQ ID NO: 412 - DNA, 20 bp, Homo Sapiens
atggcattgggcagcggcaa

SEQ ID NO: 413 - DNA, 20 bp, Homo Sapiens
tggcattgggcagcggcaaa

SEQ ID NO: 414 - DNA, 20 bp, Homo Sapiens
ggcattgggcagcggcaaac

SEQ ID NO: 415 - DNA, 20 bp, Homo Sapiens
gcattgggcagcggcaaact

SEQ ID NO: 416 - DNA, 20 bp, Homo Sapiens
cattgggcagcggcaaactg

SEQ ID NO: 417 - DNA, 20 bp, Homo Sapiens
attgggcagcggcaaactgt

SEQ ID NO: 418 - DNA, 20 bp, Homo Sapiens
ttgggcagcggcaaactgtt

SEQ ID NO: 419 - DNA, 20 bp, Homo Sapiens
tgggcagcggcaaactgttg

SEQ ID NO: 420 - DNA, 20 bp, Homo Sapiens
gggcagcggcaaactgttgt

SEQ ID NO: 421 - DNA, 20 bp, Homo Sapiens
ggcagcggcaaactgttgtc

SEQ ID NO: 422 - DNA, 20 bp, Homo Sapiens
gcagcggcaaactgttgtca

SEQ ID NO: 423 - DNA, 20 bp, Homo Sapiens
cagcggcaaactgttgtcag

SEQ ID NO: 424 - DNA, 20 bp, Homo Sapiens
agcggcaaactgttgtcaga

SEQ ID NO: 425 - DNA, 20 bp, Homo Sapiens
gcggcaaactgttgtcagaa

SEQ ID NO: 426 - DNA, 20 bp, Homo Sapiens
cggcaaactgttgtcagaac

SEQ ID NO: 427 - DNA, 20 bp, Homo Sapiens
ggcaaactgttgtcagaaca

SEQ ID NO: 428 - DNA, 20 bp, Homo Sapiens
gcaaactgttgtcagaacat

SEQ ID NO: 429 - DNA, 20 bp, Homo Sapiens
caaactgttgtcagaacatt

SEQ ID NO: 430 - DNA, 20 bp, Homo Sapiens
aaactgttgtcagaacattg

SEQ ID NO: 431 - DNA, 20 bp, Homo Sapiens
aactgttgtcagaacattga

SEQ ID NO: 432 - DNA, 20 bp, Homo Sapiens
actgttgtcagaacattgaa

SEQ ID NO: 433 - DNA, 20 bp, Homo Sapiens
ctgttgtcagaacattgaat

SEQ ID NO: 434 - DNA, 20 bp, Homo Sapiens
tgttgtcagaacattgaatg

SEQ ID NO: 435 - DNA, 20 bp, Homo Sapiens
gttgtcagaacattgaatgc

SEQ ID NO: 436 - DNA, 20 bp, Homo Sapiens
ttgtcagaacattgaatgca

SEQ ID NO: 437 - DNA, 20 bp, Homo Sapiens
tgtcagaacattgaatgcaa

SEQ ID NO: 438 - DNA, 20 bp, Homo Sapiens
gtcagaacattgaatgcaac

SEQ ID NO: 439 - DNA, 20 bp, Homo Sapiens
tcagaacattgaatgcaact

SEQ ID NO: 440 - DNA, 20 bp, Homo Sapiens
cagaacattgaatgcaactg

SEQ ID NO: 441 - DNA, 20 bp, Homo Sapiens
agaacattgaatgcaactgg

SEQ ID NO: 442 - DNA, 21 bp, Homo Sapiens
aggaactccaggatggcattg

SEQ ID NO: 443 - DNA, 21 bp, Homo Sapiens
ggaactccaggatggcattgg

SEQ ID NO: 444 - DNA, 21 bp, Homo Sapiens
gaactccaggatggcattggg

SEQ ID NO: 445 - DNA, 21 bp, Homo Sapiens
aactccaggatggcattgggc

SEQ ID NO: 446 - DNA, 21 bp, Homo Sapiens
actccaggatggcattgggca

SEQ ID NO: 447 - DNA, 21 bp, Homo Sapiens
ctccaggatggcattgggcag

SEQ ID NO: 448 - DNA, 21 bp, Homo Sapiens
tccaggatggcattgggcagc

SEQ ID NO: 449 - DNA, 21 bp, Homo Sapiens
ccaggatggcattgggcagcg

SEQ ID NO: 450 - DNA, 21 bp, Homo Sapiens
caggatggcattgggcagcgg

SEQ ID NO: 451 - DNA, 21 bp, Homo Sapiens
aggatggcattgggcagcggc

SEQ ID NO: 452 - DNA, 21 bp, Homo Sapiens
ggatggcattgggcagcggca

SEQ ID NO: 453 - DNA, 21 bp, Homo Sapiens
gatggcattgggcagcggcaa

SEQ ID NO: 454 - DNA, 21 bp, Homo Sapiens
atggcattgggcagcggcaaa

SEQ ID NO: 455 - DNA, 21 bp, Homo Sapiens
tggcattgggcagcggcaaac

SEQ ID NO: 456 - DNA, 21 bp, Homo Sapiens
ggcattgggcagcggcaaact

SEQ ID NO: 457 - DNA, 21 bp, Homo Sapiens
gcattgggcagcggcaaactg

SEQ ID NO: 458 - DNA, 21 bp, Homo Sapiens
cattgggcagcggcaaactgt

SEQ ID NO: 459 - DNA, 21 bp, Homo Sapiens
attgggcagcggcaaactgtt

SEQ ID NO: 460 - DNA, 21 bp, Homo Sapiens
ttgggcagcggcaaactgttg

SEQ ID NO: 461 - DNA, 21 bp, Homo Sapiens
tgggcagcggcaaactgttgt

SEQ ID NO: 462 - DNA, 21 bp, Homo Sapiens
gggcagcggcaaactgttgtc

SEQ ID NO: 463 - DNA, 21 bp, Homo Sapiens
ggcagcggcaaactgttgtca

SEQ ID NO: 464 - DNA, 21 bp, Homo Sapiens
gcagcggcaaactgttgtcag

SEQ ID NO: 465 - DNA, 21 bp, Homo Sapiens
cagcggcaaactgttgtcaga

SEQ ID NO: 466 - DNA, 21 bp, Homo Sapiens
agcggcaaactgttgtcagaa

SEQ ID NO: 467 - DNA, 21 bp, Homo Sapiens
gcggcaaactgttgtcagaac

SEQ ID NO: 468 - DNA, 21 bp, Homo Sapiens
cggcaaactgttgtcagaaca

SEQ ID NO: 469 - DNA, 21 bp, Homo Sapiens
ggcaaactgttgtcagaacat

SEQ ID NO: 470 - DNA, 21 bp, Homo Sapiens
gcaaactgttgtcagaacatt

SEQ ID NO: 471 - DNA, 21 bp, Homo Sapiens
caaactgttgtcagaacattg

SEQ ID NO: 472 - DNA, 21 bp, Homo Sapiens
aaactgttgtcagaacattga

SEQ ID NO: 473 - DNA, 21 bp, Homo Sapiens
aactgttgtcagaacattgaa

SEQ ID NO: 474 - DNA, 21 bp, Homo Sapiens
actgttgtcagaacattgaat

SEQ ID NO: 475 - DNA, 21 bp, Homo Sapiens
ctgttgtcagaacattgaatg

SEQ ID NO: 476 - DNA, 21 bp, Homo Sapiens
tgttgtcagaacattgaatgc

SEQ ID NO: 477 - DNA, 21 bp, Homo Sapiens
gttgtcagaacattgaatgca

SEQ ID NO: 478 - DNA, 21 bp, Homo Sapiens
ttgtcagaacattgaatgcaa

SEQ ID NO: 479 - DNA, 21 bp, Homo Sapiens
tgtcagaacattgaatgcaac

SEQ ID NO: 480 - DNA, 21 bp, Homo Sapiens
gtcagaacattgaatgcaact

SEQ ID NO: 481 - DNA, 21 bp, Homo Sapiens
tcagaacattgaatgcaactg

SEQ ID NO: 482 - DNA, 21 bp, Homo Sapiens
cagaacattgaatgcaactgg

SEQ ID NO: 483 - DNA, 21 bp, Homo Sapiens
agaacattgaatgcaactggg

SEQ ID NO: 484 - DNA, 22 bp, Homo Sapiens
caggaactccaggatggcattg

SEQ ID NO: 485 - DNA, 22 bp, Homo Sapiens
aggaactccaggatggcattgg

SEQ ID NO: 486 - DNA, 22 bp, Homo Sapiens
ggaactccaggatggcattggg

SEQ ID NO: 487 - DNA, 22 bp, Homo Sapiens
gaactccaggatggcattgggc

SEQ ID NO: 488 - DNA, 22 bp, Homo Sapiens
aactccaggatggcattgggca

SEQ ID NO: 489 - DNA, 22 bp, Homo Sapiens
actccaggatggcattgggcag

SEQ ID NO: 490 - DNA, 22 bp, Homo Sapiens
ctccaggatggcattgggcagc

SEQ ID NO: 491 - DNA, 22 bp, Homo Sapiens
tccaggatggcattgggcagcg

SEQ ID NO: 492 - DNA, 22 bp, Homo Sapiens
ccaggatggcattgggcagcgg

SEQ ID NO: 493 - DNA, 22 bp, Homo Sapiens
caggatggcattgggcagcggc

SEQ ID NO: 494 - DNA, 22 bp, Homo Sapiens
aggatggcattgggcagcggca

SEQ ID NO: 495 - DNA, 22 bp, Homo Sapiens
ggatggcattgggcagcggcaa

SEQ ID NO: 496 - DNA, 22 bp, Homo Sapiens
gatggcattgggcagcggcaaa

SEQ ID NO: 497 - DNA, 22 bp, Homo Sapiens
atggcattgggcagcggcaaac

SEQ ID NO: 498 - DNA, 22 bp, Homo Sapiens
tggcattgggcagcggcaaact

SEQ ID NO: 499 - DNA, 22 bp, Homo Sapiens
ggcattgggcagcggcaaactg

SEQ ID NO: 500 - DNA, 22 bp, Homo Sapiens
gcattgggcagcggcaaactgt

SEQ ID NO: 501 - DNA, 22 bp, Homo Sapiens
cattgggcagcggcaaactgtt

SEQ ID NO: 502 - DNA, 22 bp, Homo Sapiens
attgggcagcggcaaactgttg

SEQ ID NO: 503 - DNA, 22 bp, Homo Sapiens
ttgggcagcggcaaactgttgt

SEQ ID NO: 504 - DNA, 22 bp, Homo Sapiens
tgggcagcggcaaactgttgtc

SEQ ID NO: 505 - DNA, 22 bp, Homo Sapiens
gggcagcggcaaactgttgtca

SEQ ID NO: 506 - DNA, 22 bp, Homo Sapiens
ggcagcggcaaactgttgtcag

SEQ ID NO: 507 - DNA, 22 bp, Homo Sapiens
gcagcggcaaactgttgtcaga

SEQ ID NO: 508 - DNA, 22 bp, Homo Sapiens
cagcggcaaactgttgtcagaa

SEQ ID NO: 509 - DNA, 22 bp, Homo Sapiens
agcggcaaactgttgtcagaac

SEQ ID NO: 510 - DNA, 22 bp, Homo Sapiens
gcggcaaactgttgtcagaaca

SEQ ID NO: 511 - DNA, 22 bp, Homo Sapiens
cggcaaactgttgtcagaacat

SEQ ID NO: 512 - DNA, 22 bp, Homo Sapiens
ggcaaactgttgtcagaacatt

SEQ ID NO: 513 - DNA, 22 bp, Homo Sapiens
gcaaactgttgtcagaacattg

SEQ ID NO: 514 - DNA, 22 bp, Homo Sapiens
caaactgttgtcagaacattga

SEQ ID NO: 515 - DNA, 22 bp, Homo Sapiens
aaactgttgtcagaacattgaa

SEQ ID NO: 516 - DNA, 22 bp, Homo Sapiens
aactgttgtcagaacattgaat

SEQ ID NO: 517 - DNA, 22 bp, Homo Sapiens
actgttgtcagaacattgaatg

SEQ ID NO: 518 - DNA, 22 bp, Homo Sapiens
ctgttgtcagaacattgaatgc

SEQ ID NO: 519 - DNA, 22 bp, Homo Sapiens
tgttgtcagaacattgaatgca

SEQ ID NO: 520 - DNA, 22 bp, Homo Sapiens
gttgtcagaacattgaatgcaa

SEQ ID NO: 521 - DNA, 22 bp, Homo Sapiens
ttgtcagaacattgaatgcaac

SEQ ID NO: 522 - DNA, 22 bp, Homo Sapiens
tgtcagaacattgaatgcaact

SEQ ID NO: 523 - DNA, 22 bp, Homo Sapiens
gtcagaacattgaatgcaactg

SEQ ID NO: 524 - DNA, 22 bp, Homo Sapiens
tcagaacattgaatgcaactgg

SEQ ID NO: 525 - DNA, 22 bp, Homo Sapiens
cagaacattgaatgcaactggg

SEQ ID NO: 526 - DNA, 22 bp, Homo Sapiens
agaacattgaatgcaactgggg

SEQ ID NO: 527 - DNA, 23 bp, Homo Sapiens
acaggaactccaggatggcattg

SEQ ID NO: 528 - DNA, 23 bp, Homo Sapiens
caggaactccaggatggcattgg

SEQ ID NO: 529 - DNA, 23 bp, Homo Sapiens
aggaactccaggatggcattggg

SEQ ID NO: 530 - DNA, 23 bp, Homo Sapiens
ggaactccaggatggcattgggc

SEQ ID NO: 531 - DNA, 23 bp, Homo Sapiens
gaactccaggatggcattgggca

SEQ ID NO: 532 - DNA, 23 bp, Homo Sapiens
aactccaggatggcattgggcag

SEQ ID NO: 533 - DNA, 23 bp, Homo Sapiens
actccaggatggcattgggcagc

SEQ ID NO: 534 - DNA, 23 bp, Homo Sapiens
ctccaggatggcattgggcagcg

SEQ ID NO: 535 - DNA, 23 bp, Homo Sapiens
tccaggatggcattgggcagcgg

SEQ ID NO: 536 - DNA, 23 bp, Homo Sapiens
ccaggatggcattgggcagcggc

SEQ ID NO: 537 - DNA, 23 bp, Homo Sapiens
caggatggcattgggcagcggca

SEQ ID NO: 538 - DNA, 23 bp, Homo Sapiens
aggatggcattgggcagcggcaa

SEQ ID NO: 539 - DNA, 23 bp, Homo Sapiens
ggatggcattgggcagcggcaaa

SEQ ID NO: 540 - DNA, 23 bp, Homo Sapiens
gatggcattgggcagcggcaaac

SEQ ID NO: 541 - DNA, 23 bp, Homo Sapiens
atggcattgggcagcggcaaact

SEQ ID NO: 542 - DNA, 23 bp, Homo Sapiens
tggcattgggcagcggcaaactg

SEQ ID NO: 543 - DNA, 23 bp, Homo Sapiens
ggcattgggcagcggcaaactgt

SEQ ID NO: 544 - DNA, 23 bp, Homo Sapiens
gcattgggcagcggcaaactgtt

SEQ ID NO: 545 - DNA, 23 bp, Homo Sapiens
cattgggcagcggcaaactgttg

SEQ ID NO: 546 - DNA, 23 bp, Homo Sapiens
attgggcagcggcaaactgttgt

SEQ ID NO: 547 - DNA, 23 bp, Homo Sapiens
ttgggcagcggcaaactgttgtc

SEQ ID NO: 548 - DNA, 23 bp, Homo Sapiens
tgggcagcggcaaactgttgtca

SEQ ID NO: 549 - DNA, 23 bp, Homo Sapiens
gggcagcggcaaactgttgtcag

SEQ ID NO: 550 - DNA, 23 bp, Homo Sapiens
ggcagcggcaaactgttgtcaga

SEQ ID NO: 551 - DNA, 23 bp, Homo Sapiens
gcagcggcaaactgttgtcagaa

SEQ ID NO: 552 - DNA, 23 bp, Homo Sapiens
cagcggcaaactgttgtcagaac

SEQ ID NO: 553 - DNA, 23 bp, Homo Sapiens
agcggcaaactgttgtcagaaca

SEQ ID NO: 554 - DNA, 23 bp, Homo Sapiens
gcggcaaactgttgtcagaacat

SEQ ID NO: 555 - DNA, 23 bp, Homo Sapiens
cggcaaactgttgtcagaacatt

SEQ ID NO: 556 - DNA, 23 bp, Homo Sapiens
ggcaaactgttgtcagaacattg

SEQ ID NO: 557 - DNA, 23 bp, Homo Sapiens
gcaaactgttgtcagaacattga

SEQ ID NO: 558 - DNA, 23 bp, Homo Sapiens
caaactgttgtcagaacattgaa

SEQ ID NO: 559 - DNA, 23 bp, Homo Sapiens
aaactgttgtcagaacattgaat

SEQ ID NO: 560 - DNA, 23 bp, Homo Sapiens
aactgttgtcagaacattgaatg

SEQ ID NO: 561 - DNA, 23 bp, Homo Sapiens
actgttgtcagaacattgaatgc

SEQ ID NO: 562 - DNA, 23 bp, Homo Sapiens
ctgttgtcagaacattgaatgca

SEQ ID NO: 563 - DNA, 23 bp, Homo Sapiens
tgttgtcagaacattgaatgcaa

SEQ ID NO: 564 - DNA, 23 bp, Homo Sapiens
gttgtcagaacattgaatgcaac

SEQ ID NO: 565 - DNA, 23 bp, Homo Sapiens
ttgtcagaacattgaatgcaact

SEQ ID NO: 566 - DNA, 23 bp, Homo Sapiens
tgtcagaacattgaatgcaactg

SEQ ID NO: 567 - DNA, 23 bp, Homo Sapiens
gtcagaacattgaatgcaactgg

SEQ ID NO: 568 - DNA, 23 bp, Homo Sapiens
tcagaacattgaatgcaactggg

SEQ ID NO: 569 - DNA, 23 bp, Homo Sapiens
cagaacattgaatgcaactgggg

SEQ ID NO: 570 - DNA, 23 bp, Homo Sapiens
agaacattgaatgcaactgggga

SEQ ID NO: 571 - DNA, 24 bp, Homo Sapiens
tacaggaactccaggatggcattg

SEQ ID NO: 572 - DNA, 24 bp, Homo Sapiens
acaggaactccaggatggcattgg

SEQ ID NO: 573 - DNA, 24 bp, Homo Sapiens
caggaactccaggatggcattggg

SEQ ID NO: 574 - DNA, 24 bp, Homo Sapiens
aggaactccaggatggcattgggc

SEQ ID NO: 575 - DNA, 24 bp, Homo Sapiens
ggaactccaggatggcattgggca

SEQ ID NO: 576 - DNA, 24 bp, Homo Sapiens
gaactccaggatggcattgggcag

SEQ ID NO: 577 - DNA, 24 bp, Homo Sapiens
aactccaggatggcattgggcagc

SEQ ID NO: 578 - DNA, 24 bp, Homo Sapiens
actccaggatggcattgggcagcg

SEQ ID NO: 579 - DNA, 24 bp, Homo Sapiens
ctccaggatggcattgggcagcgg

SEQ ID NO: 580 - DNA, 24 bp, Homo Sapiens
tccaggatggcattgggcagcggc

SEQ ID NO: 581 - DNA, 24 bp, Homo Sapiens
ccaggatggcattgggcagcggca

SEQ ID NO: 582 - DNA, 24 bp, Homo Sapiens
caggatggcattgggcagcggcaa

SEQ ID NO: 583 - DNA, 24 bp, Homo Sapiens
aggatggcattgggcagcggcaaa

SEQ ID NO: 584 - DNA, 24 bp, Homo Sapiens
ggatggcattgggcagcggcaaac

SEQ ID NO: 585 - DNA, 24 bp, Homo Sapiens
gatggcattgggcagcggcaaact

SEQ ID NO: 586 - DNA, 24 bp, Homo Sapiens
atggcattgggcagcggcaaactg

SEQ ID NO: 587 - DNA, 24 bp, Homo Sapiens
tggcattgggcagcggcaaactgt

SEQ ID NO: 588 - DNA, 24 bp, Homo Sapiens
ggcattgggcagcggcaaactgtt

SEQ ID NO: 589 - DNA, 24 bp, Homo Sapiens
gcattgggcagcggcaaactgttg

SEQ ID NO: 590 - DNA, 24 bp, Homo Sapiens
cattgggcagcggcaaactgttgt

SEQ ID NO: 591 - DNA, 24 bp, Homo Sapiens
attgggcagcggcaaactgttgtc

SEQ ID NO: 592 - DNA, 24 bp, Homo Sapiens
ttgggcagcggcaaactgttgtca

SEQ ID NO: 593 - DNA, 24 bp, Homo Sapiens
tgggcagcggcaaactgttgtcag

SEQ ID NO: 594 - DNA, 24 bp, Homo Sapiens
gggcagcggcaaactgttgtcaga

SEQ ID NO: 595 - DNA, 24 bp, Homo Sapiens
ggcagcggcaaactgttgtcagaa

SEQ ID NO: 596 - DNA, 24 bp, Homo Sapiens
gcagcggcaaactgttgtcagaac

SEQ ID NO: 597 - DNA, 24 bp, Homo Sapiens
cagcggcaaactgttgtcagaaca

SEQ ID NO: 598 - DNA, 24 bp, Homo Sapiens
agcggcaaactgttgtcagaacat

SEQ ID NO: 599 - DNA, 24 bp, Homo Sapiens
gcggcaaactgttgtcagaacatt

SEQ ID NO: 600 - DNA, 24 bp, Homo Sapiens
cggcaaactgttgtcagaacattg

SEQ ID NO: 601 - DNA, 24 bp, Homo Sapiens
ggcaaactgttgtcagaacattga

SEQ ID NO: 602 - DNA, 24 bp, Homo Sapiens
gcaaactgttgtcagaacattgaa

SEQ ID NO: 603 - DNA, 24 bp, Homo Sapiens
caaactgttgtcagaacattgaat

SEQ ID NO: 604 - DNA, 24 bp, Homo Sapiens
aaactgttgtcagaacattgaatg

SEQ ID NO: 605 - DNA, 24 bp, Homo Sapiens
aactgttgtcagaacattgaatgc

SEQ ID NO: 606 - DNA, 24 bp, Homo Sapiens
actgttgtcagaacattgaatgca

SEQ ID NO: 607 - DNA, 24 bp, Homo Sapiens
ctgttgtcagaacattgaatgcaa

SEQ ID NO: 608 - DNA, 24 bp, Homo Sapiens
tgttgtcagaacattgaatgcaac

SEQ ID NO: 609 - DNA, 24 bp, Homo Sapiens
gttgtcagaacattgaatgcaact

SEQ ID NO: 610 - DNA, 24 bp, Homo Sapiens
ttgtcagaacattgaatgcaactg

SEQ ID NO: 611 - DNA, 24 bp, Homo Sapiens
tgtcagaacattgaatgcaactgg

SEQ ID NO: 612 - DNA, 24 bp, Homo Sapiens
gtcagaacattgaatgcaactggg

SEQ ID NO: 613 - DNA, 24 bp, Homo Sapiens
tcagaacattgaatgcaactgggg

SEQ ID NO: 614 - DNA, 24 bp, Homo Sapiens
cagaacattgaatgcaactgggga

SEQ ID NO: 615 - DNA, 24 bp, Homo Sapiens
agaacattgaatgcaactggggaa

SEQ ID NO: 616 - DNA, 25 bp, Homo Sapiens
ttacaggaactccaggatggcattg

SEQ ID NO: 617 - DNA, 25 bp, Homo Sapiens
tacaggaactccaggatggcattgg

SEQ ID NO: 618 - DNA, 25 bp, Homo Sapiens
acaggaactccaggatggcattggg

SEQ ID NO: 619 - DNA, 25 bp, Homo Sapiens
caggaactccaggatggcattgggc

SEQ ID NO: 620 - DNA, 25 bp, Homo Sapiens
aggaactccaggatggcattgggca

SEQ ID NO: 621 - DNA, 25 bp, Homo Sapiens
ggaactccaggatggcattgggcag

SEQ ID NO: 622 - DNA, 25 bp, Homo Sapiens
gaactccaggatggcattgggcagc

SEQ ID NO: 623 - DNA, 25 bp, Homo Sapiens
aactccaggatggcattgggcagcg

SEQ ID NO: 624 - DNA, 25 bp, Homo Sapiens
actccaggatggcattgggcagcgg

SEQ ID NO: 625 - DNA, 25 bp, Homo Sapiens
ctccaggatggcattgggcagcggc

SEQ ID NO: 626 - DNA, 25 bp, Homo Sapiens
tccaggatggcattgggcagcggca

SEQ ID NO: 627 - DNA, 25 bp, Homo Sapiens
ccaggatggcattgggcagcggcaa

SEQ ID NO: 628 - DNA, 25 bp, Homo Sapiens
caggatggcattgggcagcggcaaa

SEQ ID NO: 629 - DNA, 25 bp, Homo Sapiens
aggatggcattgggcagcggcaaac

SEQ ID NO: 630 - DNA, 25 bp, Homo Sapiens
ggatggcattgggcagcggcaaact

SEQ ID NO: 631 - DNA, 25 bp, Homo Sapiens
gatggcattgggcagcggcaaactg

SEQ ID NO: 632 - DNA, 25 bp, Homo Sapiens
atggcattgggcagcggcaaactgt

SEQ ID NO: 633 - DNA, 25 bp, Homo Sapiens
tggcattgggcagcggcaaactgtt

SEQ ID NO: 634 - DNA, 25 bp, Homo Sapiens
ggcattgggcagcggcaaactgttg

SEQ ID NO: 635 - DNA, 25 bp, Homo Sapiens
gcattgggcagcggcaaactgttgt

SEQ ID NO: 636 - DNA, 25 bp, Homo Sapiens
cattgggcagcggcaaactgttgtc

SEQ ID NO: 637 - DNA, 25 bp, Homo Sapiens
attgggcagcggcaaactgttgtca

SEQ ID NO: 638 - DNA, 25 bp, Homo Sapiens
ttgggcagcggcaaactgttgtcag

SEQ ID NO: 639 - DNA, 25 bp, Homo Sapiens
tgggcagcggcaaactgttgtcaga

SEQ ID NO: 640 - DNA, 25 bp, Homo Sapiens
gggcagcggcaaactgttgtcagaa

SEQ ID NO: 641 - DNA, 25 bp, Homo Sapiens
ggcagcggcaaactgttgtcagaac

SEQ ID NO: 642 - DNA, 25 bp, Homo Sapiens
gcagcggcaaactgttgtcagaaca

SEQ ID NO: 643 - DNA, 25 bp, Homo Sapiens
cagcggcaaactgttgtcagaacat

SEQ ID NO: 644 - DNA, 25 bp, Homo Sapiens
agcggcaaactgttgtcagaacatt

SEQ ID NO: 645 - DNA, 25 bp, Homo Sapiens
gcggcaaactgttgtcagaacattg

SEQ ID NO: 646 - DNA, 25 bp, Homo Sapiens
cggcaaactgttgtcagaacattga

SEQ ID NO: 647 - DNA, 25 bp, Homo Sapiens
ggcaaactgttgtcagaacattgaa

SEQ ID NO: 648 - DNA, 25 bp, Homo Sapiens
gcaaactgttgtcagaacattgaat

SEQ ID NO: 649 - DNA, 25 bp, Homo Sapiens
caaactgttgtcagaacattgaatg

SEQ ID NO: 650 - DNA, 25 bp, Homo Sapiens
aaactgttgtcagaacattgaatgc

SEQ ID NO: 651 - DNA, 25 bp, Homo Sapiens
aactgttgtcagaacattgaatgca

SEQ ID NO: 652 - DNA, 25 bp, Homo Sapiens
actgttgtcagaacattgaatgcaa

SEQ ID NO: 653 - DNA, 25 bp, Homo Sapiens
ctgttgtcagaacattgaatgcaac

SEQ ID NO: 654 - DNA, 25 bp, Homo Sapiens
tgttgtcagaacattgaatgcaact

SEQ ID NO: 655 - DNA, 25 bp, Homo Sapiens
gttgtcagaacattgaatgcaactg

SEQ ID NO: 656 - DNA, 25 bp, Homo Sapiens
ttgtcagaacattgaatgcaactgg

SEQ ID NO: 657 - DNA, 25 bp, Homo Sapiens
tgtcagaacattgaatgcaactggg

SEQ ID NO: 658 - DNA, 25 bp, Homo Sapiens
gtcagaacattgaatgcaactgggg

SEQ ID NO: 659 - DNA, 25 bp, Homo Sapiens
tcagaacattgaatgcaactgggga

SEQ ID NO: 660 - DNA, 25 bp, Homo Sapiens
cagaacattgaatgcaactggggaa

SEQ ID NO: 661 - DNA, 25 bp, Homo Sapiens
agaacattgaatgcaactggggaag

SEQ ID NO: 662 - DNA, 26 bp, Homo Sapiens
cttacaggaactccaggatggcattg

SEQ ID NO: 663 - DNA, 26 bp, Homo Sapiens
ttacaggaactccaggatggcattgg

SEQ ID NO: 664 - DNA, 26 bp, Homo Sapiens
tacaggaactccaggatggcattggg

SEQ ID NO: 665 - DNA, 26 bp, Homo Sapiens
acaggaactccaggatggcattgggc

SEQ ID NO: 666 - DNA, 26 bp, Homo Sapiens
caggaactccaggatggcattgggca

SEQ ID NO: 667 - DNA, 26 bp, Homo Sapiens
aggaactccaggatggcattgggcag

SEQ ID NO: 668 - DNA, 26 bp, Homo Sapiens
ggaactccaggatggcattgggcagc

SEQ ID NO: 669 - DNA, 26 bp, Homo Sapiens
gaactccaggatggcattgggcagcg

SEQ ID NO: 670 - DNA, 26 bp, Homo Sapiens
aactccaggatggcattgggcagcgg

SEQ ID NO: 671 - DNA, 26 bp, Homo Sapiens
actccaggatggcattgggcagcggc

SEQ ID NO: 672 - DNA, 26 bp, Homo Sapiens
ctccaggatggcattgggcagcggca

SEQ ID NO: 673 - DNA, 26 bp, Homo Sapiens
tccaggatggcattgggcagcggcaa

SEQ ID NO: 674 - DNA, 26 bp, Homo Sapiens
ccaggatggcattgggcagcggcaaa

SEQ ID NO: 675 - DNA, 26 bp, Homo Sapiens
caggatggcattgggcagcggcaaac

SEQ ID NO: 676 - DNA, 26 bp, Homo Sapiens
aggatggcattgggcagcggcaaact

SEQ ID NO: 677 - DNA, 26 bp, Homo Sapiens
ggatggcattgggcagcggcaaactg

SEQ ID NO: 678 - DNA, 26 bp, Homo Sapiens
gatggcattgggcagcggcaaactgt

SEQ ID NO: 679 - DNA, 26 bp, Homo Sapiens
atggcattgggcagcggcaaactgtt

SEQ ID NO: 680 - DNA, 26 bp, Homo Sapiens
tggcattgggcagcggcaaactgttg

SEQ ID NO: 681 - DNA, 26 bp, Homo Sapiens
ggcattgggcagcggcaaactgttgt

SEQ ID NO: 682 - DNA, 26 bp, Homo Sapiens
gcattgggcagcggcaaactgttgtc

SEQ ID NO: 683 - DNA, 26 bp, Homo Sapiens
cattgggcagcggcaaactgttgtca

SEQ ID NO: 684 - DNA, 26 bp, Homo Sapiens
attgggcagcggcaaactgttgtcag

SEQ ID NO: 685 - DNA, 26 bp, Homo Sapiens
ttgggcagcggcaaactgttgtcaga

SEQ ID NO: 686 - DNA, 26 bp, Homo Sapiens
tgggcagcggcaaactgttgtcagaa

SEQ ID NO: 687 - DNA, 26 bp, Homo Sapiens
gggcagcggcaaactgttgtcagaac

SEQ ID NO: 688 - DNA, 26 bp, Homo Sapiens
ggcagcggcaaactgttgtcagaaca

SEQ ID NO: 689 - DNA, 26 bp, Homo Sapiens
gcagcggcaaactgttgtcagaacat

SEQ ID NO: 690 - DNA, 26 bp, Homo Sapiens
cagcggcaaactgttgtcagaacatt

SEQ ID NO: 691 - DNA, 26 bp, Homo Sapiens
agcggcaaactgttgtcagaacattg

SEQ ID NO: 692 - DNA, 26 bp, Homo Sapiens
gcggcaaactgttgtcagaacattga

SEQ ID NO: 693 - DNA, 26 bp, Homo Sapiens
cggcaaactgttgtcagaacattgaa

SEQ ID NO: 694 - DNA, 26 bp, Homo Sapiens
ggcaaactgttgtcagaacattgaat

SEQ ID NO: 695 - DNA, 26 bp, Homo Sapiens
gcaaactgttgtcagaacattgaatg

SEQ ID NO: 696 - DNA, 26 bp, Homo Sapiens
caaactgttgtcagaacattgaatgc

SEQ ID NO: 697 - DNA, 26 bp, Homo Sapiens
aaactgttgtcagaacattgaatgca

SEQ ID NO: 698 - DNA, 26 bp, Homo Sapiens
aactgttgtcagaacattgaatgcaa

SEQ ID NO: 699 - DNA, 26 bp, Homo Sapiens
actgttgtcagaacattgaatgcaac

SEQ ID NO: 700 - DNA, 26 bp, Homo Sapiens
ctgttgtcagaacattgaatgcaact

SEQ ID NO: 701 - DNA, 26 bp, Homo Sapiens
tgttgtcagaacattgaatgcaactg

SEQ ID NO: 702 - DNA, 26 bp, Homo Sapiens
gttgtcagaacattgaatgcaactgg

SEQ ID NO: 703 - DNA, 26 bp, Homo Sapiens
ttgtcagaacattgaatgcaactggg

SEQ ID NO: 704 - DNA, 26 bp, Homo Sapiens
tgtcagaacattgaatgcaactgggg

SEQ ID NO: 705 - DNA, 26 bp, Homo Sapiens
gtcagaacattgaatgcaactgggga

SEQ ID NO: 706 - DNA, 26 bp, Homo Sapiens
tcagaacattgaatgcaactggggaa

SEQ ID NO: 707 - DNA, 26 bp, Homo Sapiens
cagaacattgaatgcaactggggaag

SEQ ID NO: 708 - DNA, 26 bp, Homo Sapiens
agaacattgaatgcaactggggaaga

SEQ ID NO: 709 - DNA, 27 bp, Homo Sapiens
tcttacaggaactccaggatggcattg

SEQ ID NO: 710 - DNA, 27 bp, Homo Sapiens
cttacaggaactccaggatggcattgg

SEQ ID NO: 711 - DNA, 27 bp, Homo Sapiens
ttacaggaactccaggatggcattggg

SEQ ID NO: 712 - DNA, 27 bp, Homo Sapiens
tacaggaactccaggatggcattgggc

SEQ ID NO: 713 - DNA, 27 bp, Homo Sapiens
acaggaactccaggatggcattgggca

SEQ ID NO: 714 - DNA, 27 bp, Homo Sapiens
caggaactccaggatggcattgggcag

SEQ ID NO: 715 - DNA, 27 bp, Homo Sapiens
aggaactccaggatggcattgggcagc

SEQ ID NO: 716 - DNA, 27 bp, Homo Sapiens
ggaactccaggatggcattgggcagcg

SEQ ID NO: 717 - DNA, 27 bp, Homo Sapiens
gaactccaggatggcattgggcagcgg

SEQ ID NO: 718 - DNA, 27 bp, Homo Sapiens
aactccaggatggcattgggcagcggc

SEQ ID NO: 719 - DNA, 27 bp, Homo Sapiens
actccaggatggcattgggcagcggca

SEQ ID NO: 720 - DNA, 27 bp, Homo Sapiens
ctccaggatggcattgggcagcggcaa

SEQ ID NO: 721 - DNA, 27 bp, Homo Sapiens
tccaggatggcattgggcagcggcaaa

SEQ ID NO: 722 - DNA, 27 bp, Homo Sapiens
ccaggatggcattgggcagcggcaaac

SEQ ID NO: 723 - DNA, 27 bp, Homo Sapiens
caggatggcattgggcagcggcaaact

SEQ ID NO: 724 - DNA, 27 bp, Homo Sapiens
aggatggcattgggcagcggcaaactg

SEQ ID NO: 725 - DNA, 27 bp, Homo Sapiens
ggatggcattgggcagcggcaaactgt

SEQ ID NO: 726 - DNA, 27 bp, Homo Sapiens
gatggcattgggcagcggcaaactgtt

SEQ ID NO: 727 - DNA, 27 bp, Homo Sapiens
atggcattgggcagcggcaaactgttg

SEQ ID NO: 728 - DNA, 27 bp, Homo Sapiens
tggcattgggcagcggcaaactgttgt

SEQ ID NO: 729 - DNA, 27 bp, Homo Sapiens
ggcattgggcagcggcaaactgttgtc

SEQ ID NO: 730 - DNA, 27 bp, Homo Sapiens
gcattgggcagcggcaaactgttgtca

SEQ ID NO: 731 - DNA, 27 bp, Homo Sapiens
cattgggcagcggcaaactgttgtcag

SEQ ID NO: 732 - DNA, 27 bp, Homo Sapiens
attgggcagcggcaaactgttgtcaga

SEQ ID NO: 733 - DNA, 27 bp, Homo Sapiens
ttgggcagcggcaaactgttgtcagaa

SEQ ID NO: 734 - DNA, 27 bp, Homo Sapiens
tgggcagcggcaaactgttgtcagaac

SEQ ID NO: 735 - DNA, 27 bp, Homo Sapiens
gggcagcggcaaactgttgtcagaaca

SEQ ID NO: 736 - DNA, 27 bp, Homo Sapiens
ggcagcggcaaactgttgtcagaacat

SEQ ID NO: 737 - DNA, 27 bp, Homo Sapiens
gcagcggcaaactgttgtcagaacatt

SEQ ID NO: 738 - DNA, 27 bp, Homo Sapiens
cagcggcaaactgttgtcagaacattg

SEQ ID NO: 739 - DNA, 27 bp, Homo Sapiens
agcggcaaactgttgtcagaacattga

SEQ ID NO: 740 - DNA, 27 bp, Homo Sapiens
gcggcaaactgttgtcagaacattgaa

SEQ ID NO: 741 - DNA, 27 bp, Homo Sapiens
cggcaaactgttgtcagaacattgaat

SEQ ID NO: 742 - DNA, 27 bp, Homo Sapiens
ggcaaactgttgtcagaacattgaatg

SEQ ID NO: 743 - DNA, 27 bp, Homo Sapiens
gcaaactgttgtcagaacattgaatgc

SEQ ID NO: 744 - DNA, 27 bp, Homo Sapiens
caaactgttgtcagaacattgaatgca

SEQ ID NO: 745 - DNA, 27 bp, Homo Sapiens
aaactgttgtcagaacattgaatgcaa

SEQ ID NO: 746 - DNA, 27 bp, Homo Sapiens
aactgttgtcagaacattgaatgcaac

SEQ ID NO: 747 - DNA, 27 bp, Homo Sapiens
actgttgtcagaacattgaatgcaact

SEQ ID NO: 748 - DNA, 27 bp, Homo Sapiens
ctgttgtcagaacattgaatgcaactg

SEQ ID NO: 749 - DNA, 27 bp, Homo Sapiens
tgttgtcagaacattgaatgcaactgg

SEQ ID NO: 750 - DNA, 27 bp, Homo Sapiens
gttgtcagaacattgaatgcaactggg

SEQ ID NO: 751 - DNA, 27 bp, Homo Sapiens
ttgtcagaacattgaatgcaactgggg

SEQ ID NO: 752 - DNA, 27 bp, Homo Sapiens
tgtcagaacattgaatgcaactgggga

SEQ ID NO: 753 - DNA, 27 bp, Homo Sapiens
gtcagaacattgaatgcaactggggaa

SEQ ID NO: 754 - DNA, 27 bp, Homo Sapiens
tcagaacattgaatgcaactggggaag

SEQ ID NO: 755 - DNA, 27 bp, Homo Sapiens
cagaacattgaatgcaactggggaaga

SEQ ID NO: 756 - DNA, 27 bp, Homo Sapiens
agaacattgaatgcaactggggaagaa

SEQ ID NO: 757 - DNA, 28 bp, Homo Sapiens
atcttacaggaactccaggatggcattg

SEQ ID NO: 758 - DNA, 28 bp, Homo Sapiens
tcttacaggaactccaggatggcattgg

SEQ ID NO: 759 - DNA, 28 bp, Homo Sapiens
cttacaggaactccaggatggcattggg

SEQ ID NO: 760 - DNA, 28 bp, Homo Sapiens
ttacaggaactccaggatggcattgggc

SEQ ID NO: 761 - DNA, 28 bp, Homo Sapiens
tacaggaactccaggatggcattgggca

SEQ ID NO: 762 - DNA, 28 bp, Homo Sapiens
acaggaactccaggatggcattgggcag

SEQ ID NO: 763 - DNA, 28 bp, Homo Sapiens
caggaactccaggatggcattgggcagc

SEQ ID NO: 764 - DNA, 28 bp, Homo Sapiens
aggaactccaggatggcattgggcagcg

SEQ ID NO: 765 - DNA, 28 bp, Homo Sapiens
ggaactccaggatggcattgggcagcgg

SEQ ID NO: 766 - DNA, 28 bp, Homo Sapiens
gaactccaggatggcattgggcagcggc

SEQ ID NO: 767 - DNA, 28 bp, Homo Sapiens
aactccaggatggcattgggcagcggca

SEQ ID NO: 768 - DNA, 28 bp, Homo Sapiens
actccaggatggcattgggcagcggcaa

SEQ ID NO: 769 - DNA, 28 bp, Homo Sapiens
ctccaggatggcattgggcagcggcaaa

SEQ ID NO: 770 - DNA, 28 bp, Homo Sapiens
tccaggatggcattgggcagcggcaaac

SEQ ID NO: 771 - DNA, 28 bp, Homo Sapiens
ccaggatggcattgggcagcggcaaact

SEQ ID NO: 772 - DNA, 28 bp, Homo Sapiens
caggatggcattgggcagcggcaaactg

SEQ ID NO: 773 - DNA, 28 bp, Homo Sapiens
aggatggcattgggcagcggcaaactgt

SEQ ID NO: 774 - DNA, 28 bp, Homo Sapiens
ggatggcattgggcagcggcaaactgtt

SEQ ID NO: 775 - DNA, 28 bp, Homo Sapiens
gatggcattgggcagcggcaaactgttg

SEQ ID NO: 776 - DNA, 28 bp, Homo Sapiens
atggcattgggcagcggcaaactgttgt

SEQ ID NO: 777 - DNA, 28 bp, Homo Sapiens
tggcattgggcagcggcaaactgttgtc

SEQ ID NO: 778 - DNA, 28 bp, Homo Sapiens
ggcattgggcagcggcaaactgttgtca

SEQ ID NO: 779 - DNA, 28 bp, Homo Sapiens
gcattgggcagcggcaaactgttgtcag

SEQ ID NO: 780 - DNA, 28 bp, Homo Sapiens
cattgggcagcggcaaactgttgtcaga

SEQ ID NO: 781 - DNA, 28 bp, Homo Sapiens
attgggcagcggcaaactgttgtcagaa

SEQ ID NO: 782 - DNA, 28 bp, Homo Sapiens
ttgggcagcggcaaactgttgtcagaac

SEQ ID NO: 783 - DNA, 28 bp, Homo Sapiens
tgggcagcggcaaactgttgtcagaaca

SEQ ID NO: 784 - DNA, 28 bp, Homo Sapiens
gggcagcggcaaactgttgtcagaacat

SEQ ID NO: 785 - DNA, 28 bp, Homo Sapiens
ggcagcggcaaactgttgtcagaacatt

SEQ ID NO: 786 - DNA, 28 bp, Homo Sapiens
gcagcggcaaactgttgtcagaacattg

SEQ ID NO: 787 - DNA, 28 bp, Homo Sapiens
cagcggcaaactgttgtcagaacattga

SEQ ID NO: 788 - DNA, 28 bp, Homo Sapiens
agcggcaaactgttgtcagaacattgaa

SEQ ID NO: 789 - DNA, 28 bp, Homo Sapiens
gcggcaaactgttgtcagaacattgaat

SEQ ID NO: 790 - DNA, 28 bp, Homo Sapiens
cggcaaactgttgtcagaacattgaatg

SEQ ID NO: 791 - DNA, 28 bp, Homo Sapiens
ggcaaactgttgtcagaacattgaatgc

SEQ ID NO: 792 - DNA, 28 bp, Homo Sapiens
gcaaactgttgtcagaacattgaatgca

SEQ ID NO: 793 - DNA, 28 bp, Homo Sapiens
caaactgttgtcagaacattgaatgcaa

SEQ ID NO: 794 - DNA, 28 bp, Homo Sapiens
aaactgttgtcagaacattgaatgcaac

SEQ ID NO: 795 - DNA, 28 bp, Homo Sapiens
aactgttgtcagaacattgaatgcaact

SEQ ID NO: 796 - DNA, 28 bp, Homo Sapiens
actgttgtcagaacattgaatgcaactg

SEQ ID NO: 797 - DNA, 28 bp, Homo Sapiens
ctgttgtcagaacattgaatgcaactgg

SEQ ID NO: 798 - DNA, 28 bp, Homo Sapiens
tgttgtcagaacattgaatgcaactggg

SEQ ID NO: 799 - DNA, 28 bp, Homo Sapiens
gttgtcagaacattgaatgcaactgggg

SEQ ID NO: 800 - DNA, 28 bp, Homo Sapiens
ttgtcagaacattgaatgcaactgggga

SEQ ID NO: 801 - DNA, 28 bp, Homo Sapiens
tgtcagaacattgaatgcaactggggaa

SEQ ID NO: 802 - DNA, 28 bp, Homo Sapiens
gtcagaacattgaatgcaactggggaag

SEQ ID NO: 803 - DNA, 28 bp, Homo Sapiens
tcagaacattgaatgcaactggggaaga

SEQ ID NO: 804 - DNA, 28 bp, Homo Sapiens
cagaacattgaatgcaactggggaagaa

SEQ ID NO: 805 - DNA, 28 bp, Homo Sapiens
agaacattgaatgcaactggggaagaaa

SEQ ID NO: 806 - DNA, 29 bp, Homo Sapiens
tatcttacaggaactccaggatggcattg

SEQ ID NO: 807 - DNA, 29 bp, Homo Sapiens
atcttacaggaactccaggatggcattgg

SEQ ID NO: 808 - DNA, 29 bp, Homo Sapiens
tcttacaggaactccaggatggcattggg

SEQ ID NO: 809 - DNA, 29 bp, Homo Sapiens
cttacaggaactccaggatggcattgggc

SEQ ID NO: 810 - DNA, 29 bp, Homo Sapiens
ttacaggaactccaggatggcattgggca

SEQ ID NO: 811 - DNA, 29 bp, Homo Sapiens
tacaggaactccaggatggcattgggcag

SEQ ID NO: 812 - DNA, 29 bp, Homo Sapiens
acaggaactccaggatggcattgggcagc

SEQ ID NO: 813 - DNA, 29 bp, Homo Sapiens
caggaactccaggatggcattgggcagcg

SEQ ID NO: 814 - DNA, 29 bp, Homo Sapiens
aggaactccaggatggcattgggcagcgg

SEQ ID NO: 815 - DNA, 29 bp, Homo Sapiens
ggaactccaggatggcattgggcagcggc

SEQ ID NO: 816 - DNA, 29 bp, Homo Sapiens
gaactccaggatggcattgggcagcggca

SEQ ID NO: 817 - DNA, 29 bp, Homo Sapiens
aactccaggatggcattgggcagcggcaa

SEQ ID NO: 818 - DNA, 29 bp, Homo Sapiens
actccaggatggcattgggcagcggcaaa

SEQ ID NO: 819 - DNA, 29 bp, Homo Sapiens
ctccaggatggcattgggcagcggcaaac

SEQ ID NO: 820 - DNA, 29 bp, Homo Sapiens
tccaggatggcattgggcagcggcaaact

SEQ ID NO: 821 - DNA, 29 bp, Homo Sapiens
ccaggatggcattgggcagcggcaaactg

SEQ ID NO: 822 - DNA, 29 bp, Homo Sapiens
caggatggcattgggcagcggcaaactgt

SEQ ID NO: 823 - DNA, 29 bp, Homo Sapiens
aggatggcattgggcagcggcaaactgtt

SEQ ID NO: 824 - DNA, 29 bp, Homo Sapiens
ggatggcattgggcagcggcaaactgttg

SEQ ID NO: 825 - DNA, 29 bp, Homo Sapiens
gatggcattgggcagcggcaaactgttgt

SEQ ID NO: 826 - DNA, 29 bp, Homo Sapiens
atggcattgggcagcggcaaactgttgtc

SEQ ID NO: 827 - DNA, 29 bp, Homo Sapiens
tggcattgggcagcggcaaactgttgtca

SEQ ID NO: 828 - DNA, 29 bp, Homo Sapiens
ggcattgggcagcggcaaactgttgtcag

SEQ ID NO: 829 - DNA, 29 bp, Homo Sapiens
gcattgggcagcggcaaactgttgtcaga

SEQ ID NO: 830 - DNA, 29 bp, Homo Sapiens
cattgggcagcggcaaactgttgtcagaa

SEQ ID NO: 831 - DNA, 29 bp, Homo Sapiens
attgggcagcggcaaactgttgtcagaac

SEQ ID NO: 832 - DNA, 29 bp, Homo Sapiens
ttgggcagcggcaaactgttgtcagaaca

SEQ ID NO: 833 - DNA, 29 bp, Homo Sapiens
tgggcagcggcaaactgttgtcagaacat

SEQ ID NO: 834 - DNA, 29 bp, Homo Sapiens
gggcagcggcaaactgttgtcagaacatt

SEQ ID NO: 835 - DNA, 29 bp, Homo Sapiens
ggcagcggcaaactgttgtcagaacattg

SEQ ID NO: 836 - DNA, 29 bp, Homo Sapiens
gcagcggcaaactgttgtcagaacattga

SEQ ID NO: 837 - DNA, 29 bp, Homo Sapiens
cagcggcaaactgttgtcagaacattgaa

SEQ ID NO: 838 - DNA, 29 bp, Homo Sapiens
agcggcaaactgttgtcagaacattgaat

SEQ ID NO: 839 - DNA, 29 bp, Homo Sapiens
gcggcaaactgttgtcagaacattgaatg

SEQ ID NO: 840 - DNA, 29 bp, Homo Sapiens
cggcaaactgttgtcagaacattgaatgc

SEQ ID NO: 841 - DNA, 29 bp, Homo Sapiens
ggcaaactgttgtcagaacattgaatgca

SEQ ID NO: 842 - DNA, 29 bp, Homo Sapiens
gcaaactgttgtcagaacattgaatgcaa

SEQ ID NO: 843 - DNA, 29 bp, Homo Sapiens
caaactgttgtcagaacattgaatgcaac

SEQ ID NO: 844 - DNA, 29 bp, Homo Sapiens
aaactgttgtcagaacattgaatgcaact

SEQ ID NO: 845 - DNA, 29 bp, Homo Sapiens
aactgttgtcagaacattgaatgcaactg

SEQ ID NO: 846 - DNA, 29 bp, Homo Sapiens
actgttgtcagaacattgaatgcaactgg

SEQ ID NO: 847 - DNA, 29 bp, Homo Sapiens
ctgttgtcagaacattgaatgcaactggg

SEQ ID NO: 848 - DNA, 29 bp, Homo Sapiens
tgttgtcagaacattgaatgcaactgggg

SEQ ID NO: 849 - DNA, 29 bp, Homo Sapiens
gttgtcagaacattgaatgcaactgggga

SEQ ID NO: 850 - DNA, 29 bp, Homo Sapiens
ttgtcagaacattgaatgcaactggggaa

SEQ ID NO: 851 - DNA, 29 bp, Homo Sapiens
tgtcagaacattgaatgcaactggggaag

SEQ ID NO: 852 - DNA, 29 bp, Homo Sapiens
gtcagaacattgaatgcaactggggaaga

SEQ ID NO: 853 - DNA, 29 bp, Homo Sapiens
tcagaacattgaatgcaactggggaagaa

SEQ ID NO: 854 - DNA, 29 bp, Homo Sapiens
cagaacattgaatgcaactggggaagaaa

SEQ ID NO: 855 - DNA, 29 bp, Homo Sapiens
agaacattgaatgcaactggggaagaaat

SEQ ID NO: 856 - DNA, 30 bp, Homo Sapiens
gtatcttacaggaactccaggatggcattg

SEQ ID NO: 857 - DNA, 30 bp, Homo Sapiens
tatcttacaggaactccaggatggcattgg

SEQ ID NO: 858 - DNA, 30 bp, Homo Sapiens
atcttacaggaactccaggatggcattggg

SEQ ID NO: 859 - DNA, 30 bp, Homo Sapiens
tcttacaggaactccaggatggcattgggc

SEQ ID NO: 860 - DNA, 30 bp, Homo Sapiens
cttacaggaactccaggatggcattgggca

SEQ ID NO: 861 - DNA, 30 bp, Homo Sapiens
ttacaggaactccaggatggcattgggcag

SEQ ID NO: 862 - DNA, 30 bp, Homo Sapiens
tacaggaactccaggatggcattgggcagc

SEQ ID NO: 863 - DNA, 30 bp, Homo Sapiens
acaggaactccaggatggcattgggcagcg

SEQ ID NO: 864 - DNA, 30 bp, Homo Sapiens
caggaactccaggatggcattgggcagcgg

SEQ ID NO: 865 - DNA, 30 bp, Homo Sapiens
aggaactccaggatggcattgggcagcggc

SEQ ID NO: 866 - DNA, 30 bp, Homo Sapiens
ggaactccaggatggcattgggcagcggca

SEQ ID NO: 867 - DNA, 30 bp, Homo Sapiens
gaactccaggatggcattgggcagcggcaa

SEQ ID NO: 868 - DNA, 30 bp, Homo Sapiens
aactccaggatggcattgggcagcggcaaa

SEQ ID NO: 869 - DNA, 30 bp, Homo Sapiens
actccaggatggcattgggcagcggcaaac

SEQ ID NO: 870 - DNA, 30 bp, Homo Sapiens
ctccaggatggcattgggcagcggcaaact

SEQ ID NO: 871 - DNA, 30 bp, Homo Sapiens
tccaggatggcattgggcagcggcaaactg

SEQ ID NO: 872 - DNA, 30 bp, Homo Sapiens
ccaggatggcattgggcagcggcaaactgt

SEQ ID NO: 873 - DNA, 30 bp, Homo Sapiens
caggatggcattgggcagcggcaaactgtt

SEQ ID NO: 874 - DNA, 30 bp, Homo Sapiens
aggatggcattgggcagcggcaaactgttg

SEQ ID NO: 875 - DNA, 30 bp, Homo Sapiens
ggatggcattgggcagcggcaaactgttgt

SEQ ID NO: 876 - DNA, 30 bp, Homo Sapiens
gatggcattgggcagcggcaaactgttgtc

SEQ ID NO: 877 - DNA, 30 bp, Homo Sapiens
atggcattgggcagcggcaaactgttgtca

SEQ ID NO: 878 - DNA, 30 bp, Homo Sapiens
tggcattgggcagcggcaaactgttgtcag

SEQ ID NO: 879 - DNA, 30 bp, Homo Sapiens
ggcattgggcagcggcaaactgttgtcaga

SEQ ID NO: 880 - DNA, 30 bp, Homo Sapiens
gcattgggcagcggcaaactgttgtcagaa

SEQ ID NO: 881 - DNA, 30 bp, Homo Sapiens
cattgggcagcggcaaactgttgtcagaac

SEQ ID NO: 882 - DNA, 30 bp, Homo Sapiens
attgggcagcggcaaactgttgtcagaaca

SEQ ID NO: 883 - DNA, 30 bp, Homo Sapiens
ttgggcagcggcaaactgttgtcagaacat

SEQ ID NO: 884 - DNA, 30 bp, Homo Sapiens
tgggcagcggcaaactgttgtcagaacatt

SEQ ID NO: 885 - DNA, 30 bp, Homo Sapiens
gggcagcggcaaactgttgtcagaacattg

SEQ ID NO: 886 - DNA, 30 bp, Homo Sapiens
ggcagcggcaaactgttgtcagaacattga

SEQ ID NO: 887 - DNA, 30 bp, Homo Sapiens
gcagcggcaaactgttgtcagaacattgaa

SEQ ID NO: 888 - DNA, 30 bp, Homo Sapiens
cagcggcaaactgttgtcagaacattgaat

SEQ ID NO: 889 - DNA, 30 bp, Homo Sapiens
agcggcaaactgttgtcagaacattgaatg

SEQ ID NO: 890 - DNA, 30 bp, Homo Sapiens
gcggcaaactgttgtcagaacattgaatgc

SEQ ID NO: 891 - DNA, 30 bp, Homo Sapiens
cggcaaactgttgtcagaacattgaatgca

SEQ ID NO: 892 - DNA, 30 bp, Homo Sapiens
ggcaaactgttgtcagaacattgaatgcaa

SEQ ID NO: 893 - DNA, 30 bp, Homo Sapiens
gcaaactgttgtcagaacattgaatgcaac

SEQ ID NO: 894 - DNA, 30 bp, Homo Sapiens
caaactgttgtcagaacattgaatgcaact

SEQ ID NO: 895 - DNA, 30 bp, Homo Sapiens
aaactgttgtcagaacattgaatgcaactg

SEQ ID NO: 896 - DNA, 30 bp, Homo Sapiens
aactgttgtcagaacattgaatgcaactgg

SEQ ID NO: 897 - DNA, 30 bp, Homo Sapiens
actgttgtcagaacattgaatgcaactggg

SEQ ID NO: 898 - DNA, 30 bp, Homo Sapiens
ctgttgtcagaacattgaatgcaactgggg

SEQ ID NO: 899 - DNA, 30 bp, Homo Sapiens
tgttgtcagaacattgaatgcaactgggga

SEQ ID NO: 900 - DNA, 30 bp, Homo Sapiens
gttgtcagaacattgaatgcaactggggaa

SEQ ID NO: 901 - DNA, 30 bp, Homo Sapiens
ttgtcagaacattgaatgcaactggggaag

SEQ ID NO: 902 - DNA, 30 bp, Homo Sapiens
tgtcagaacattgaatgcaactggggaaga

SEQ ID NO: 903 - DNA, 30 bp, Homo Sapiens
gtcagaacattgaatgcaactggggaagaa

SEQ ID NO: 904 - DNA, 30 bp, Homo Sapiens
tcagaacattgaatgcaactggggaagaaa

SEQ ID NO: 905 - DNA, 30 bp, Homo Sapiens
cagaacattgaatgcaactggggaagaaat

SEQ ID NO: 906 - DNA, 30 bp, Homo Sapiens
agaacattgaatgcaactggggaagaaata

SEQ ID NO: 907 - DNA, 15 bp, Homo Sapiens
caatgccatcctgga

SEQ ID NO: 908 - DNA, 15 bp, Homo Sapiens
ccaatgccatcctgg

SEQ ID NO: 909 - DNA, 15 bp, Homo Sapiens
cccaatgccatcctg

SEQ ID NO: 910 - DNA, 15 bp, Homo Sapiens
gcccaatgccatcct

SEQ ID NO: 911 - DNA, 15 bp, Homo Sapiens
tgcccaatgccatcc

SEQ ID NO: 912 - DNA, 15 bp, Homo Sapiens
ctgcccaatgccatc

SEQ ID NO: 913 - DNA, 15 bp, Homo Sapiens
gctgcccaatgccat

SEQ ID NO: 914 - DNA, 15 bp, Homo Sapiens
cgctgcccaatgcca

SEQ ID NO: 915 - DNA, 15 bp, Homo Sapiens
ccgctgcccaatgcc

SEQ ID NO: 916 - DNA, 15 bp, Homo Sapiens
gccgctgcccaatgc

SEQ ID NO: 917 - DNA, 15 bp, Homo Sapiens
tgccgctgcccaatg

SEQ ID NO: 918 - DNA, 15 bp, Homo Sapiens
ttgccgctgcccaat

SEQ ID NO: 919 - DNA, 15 bp, Homo Sapiens
tttgccgctgcccaa

SEQ ID NO: 920 - DNA, 15 bp, Homo Sapiens
gtttgccgctgccca

SEQ ID NO: 921 - DNA, 15 bp, Homo Sapiens
agtttgccgctgccc

SEQ ID NO: 922 - DNA, 15 bp, Homo Sapiens
cagtttgccgctgcc

SEQ ID NO: 923 - DNA, 15 bp, Homo Sapiens
acagtttgccgctgc

SEQ ID NO: 924 - DNA, 15 bp, Homo Sapiens
aacagtttgccgctg

SEQ ID NO: 925 - DNA, 15 bp, Homo Sapiens
caacagtttgccgct

SEQ ID NO: 926 - DNA, 15 bp, Homo Sapiens
acaacagtttgccgc

SEQ ID NO: 927 - DNA, 15 bp, Homo Sapiens
gacaacagtttgccg

SEQ ID NO: 928 - DNA, 15 bp, Homo Sapiens
tgacaacagtttgcc

SEQ ID NO: 929 - DNA, 15 bp, Homo Sapiens
ctgacaacagtttgc

SEQ ID NO: 930 - DNA, 15 bp, Homo Sapiens
tctgacaacagtttg

SEQ ID NO: 931 - DNA, 15 bp, Homo Sapiens
ttctgacaacagttt

SEQ ID NO: 932 - DNA, 15 bp, Homo Sapiens
gttctgacaacagtt

SEQ ID NO: 933 - DNA, 15 bp, Homo Sapiens
tgttctgacaacagt

SEQ ID NO: 934 - DNA, 15 bp, Homo Sapiens
atgttctgacaacag

SEQ ID NO: 935 - DNA, 15 bp, Homo Sapiens
aatgttctgacaaca

SEQ ID NO: 936 - DNA, 15 bp, Homo Sapiens
caatgttctgacaac

SEQ ID NO: 937 - DNA, 15 bp, Homo Sapiens
tcaatgttctgacaa

SEQ ID NO: 938 - DNA, 15 bp, Homo Sapiens
ttcaatgttctgaca

SEQ ID NO: 939 - DNA, 15 bp, Homo Sapiens
attcaatgttctgac

SEQ ID NO: 940 - DNA, 15 bp, Homo Sapiens
cattcaatgttctga

SEQ ID NO: 941 - DNA, 15 bp, Homo Sapiens
gcattcaatgttctg

SEQ ID NO: 942 - DNA, 15 bp, Homo Sapiens
tgcattcaatgttct

SEQ ID NO: 943 - DNA, 16 bp, Homo Sapiens
caatgccatcctggag

SEQ ID NO: 944 - DNA, 16 bp, Homo Sapiens
ccaatgccatcctgga

SEQ ID NO: 945 - DNA, 16 bp, Homo Sapiens
cccaatgccatcctgg

SEQ ID NO: 946 - DNA, 16 bp, Homo Sapiens
gcccaatgccatcctg

SEQ ID NO: 947 - DNA, 16 bp, Homo Sapiens
tgcccaatgccatcct

SEQ ID NO: 948 - DNA, 16 bp, Homo Sapiens
ctgcccaatgccatcc

SEQ ID NO: 949 - DNA, 16 bp, Homo Sapiens
gctgcccaatgccatc

SEQ ID NO: 950 - DNA, 16 bp, Homo Sapiens
cgctgcccaatgccat

SEQ ID NO: 951 - DNA, 16 bp, Homo Sapiens
ccgctgcccaatgcca

SEQ ID NO: 952 - DNA, 16 bp, Homo Sapiens
gccgctgcccaatgcc

SEQ ID NO: 953 - DNA, 16 bp, Homo Sapiens
tgccgctgcccaatgc

SEQ ID NO: 954 - DNA, 16 bp, Homo Sapiens
ttgccgctgcccaatg

SEQ ID NO: 955 - DNA, 16 bp, Homo Sapiens
tttgccgctgcccaat

SEQ ID NO: 956 - DNA, 16 bp, Homo Sapiens
gtttgccgctgcccaa

SEQ ID NO: 957 - DNA, 16 bp, Homo Sapiens
agtttgccgctgccca

SEQ ID NO: 958 - DNA, 16 bp, Homo Sapiens
cagtttgccgctgccc

SEQ ID NO: 959 - DNA, 16 bp, Homo Sapiens
acagtttgccgctgcc

SEQ ID NO: 960 - DNA, 16 bp, Homo Sapiens
aacagtttgccgctgc

SEQ ID NO: 961 - DNA, 16 bp, Homo Sapiens
caacagtttgccgctg

SEQ ID NO: 962 - DNA, 16 bp, Homo Sapiens
acaacagtttgccgct

SEQ ID NO: 963 - DNA, 16 bp, Homo Sapiens
gacaacagtttgccgc

SEQ ID NO: 964 - DNA, 16 bp, Homo Sapiens
tgacaacagtttgccg

SEQ ID NO: 965 - DNA, 16 bp, Homo Sapiens
ctgacaacagtttgcc

SEQ ID NO: 966 - DNA, 16 bp, Homo Sapiens
tctgacaacagtttgc

SEQ ID NO: 967 - DNA, 16 bp, Homo Sapiens
ttctgacaacagtttg

SEQ ID NO: 968 - DNA, 16 bp, Homo Sapiens
gttctgacaacagttt

SEQ ID NO: 969 - DNA, 16 bp, Homo Sapiens
tgttctgacaacagtt

SEQ ID NO: 970 - DNA, 16 bp, Homo Sapiens
atgttctgacaacagt

SEQ ID NO: 971 - DNA, 16 bp, Homo Sapiens
aatgttctgacaacag

SEQ ID NO: 972 - DNA, 16 bp, Homo Sapiens
caatgttctgacaaca

SEQ ID NO: 973 - DNA, 16 bp, Homo Sapiens
tcaatgttctgacaac

SEQ ID NO: 974 - DNA, 16 bp, Homo Sapiens
ttcaatgttctgacaa

SEQ ID NO: 975 - DNA, 16 bp, Homo Sapiens
attcaatgttctgaca

SEQ ID NO: 976 - DNA, 16 bp, Homo Sapiens
cattcaatgttctgac

SEQ ID NO: 977 - DNA, 16 bp, Homo Sapiens
gcattcaatgttctga

SEQ ID NO: 978 - DNA, 16 bp, Homo Sapiens
tgcattcaatgttctg

SEQ ID NO: 979 - DNA, 16 bp, Homo Sapiens
ttgcattcaatgttct

SEQ ID NO: 980 - DNA, 17 bp, Homo Sapiens
caatgccatcctggagt

SEQ ID NO: 981 - DNA, 17 bp, Homo Sapiens
ccaatgccatcctggag

SEQ ID NO: 982 - DNA, 17 bp, Homo Sapiens
cccaatgccatcctgga

SEQ ID NO: 983 - DNA, 17 bp, Homo Sapiens
gcccaatgccatcctgg

SEQ ID NO: 984 - DNA, 17 bp, Homo Sapiens
tgcccaatgccatcctg

SEQ ID NO: 985 - DNA, 17 bp, Homo Sapiens
ctgcccaatgccatcct

SEQ ID NO: 986 - DNA, 17 bp, Homo Sapiens
gctgcccaatgccatcc

SEQ ID NO: 987 - DNA, 17 bp, Homo Sapiens
cgctgcccaatgccatc

SEQ ID NO: 988 - DNA, 17 bp, Homo Sapiens
ccgctgcccaatgccat

SEQ ID NO: 989 - DNA, 17 bp, Homo Sapiens
gccgctgcccaatgcca

SEQ ID NO: 990 - DNA, 17 bp, Homo Sapiens
tgccgctgcccaatgcc

SEQ ID NO: 991 - DNA, 17 bp, Homo Sapiens
ttgccgctgcccaatgc

SEQ ID NO: 992 - DNA, 17 bp, Homo Sapiens
tttgccgctgcccaatg

SEQ ID NO: 993 - DNA, 17 bp, Homo Sapiens
gtttgccgctgcccaat

SEQ ID NO: 994 - DNA, 17 bp, Homo Sapiens
agtttgccgctgcccaa

SEQ ID NO: 995 - DNA, 17 bp, Homo Sapiens
cagtttgccgctgccca

SEQ ID NO: 996 - DNA, 17 bp, Homo Sapiens
acagtttgccgctgccc

SEQ ID NO: 997 - DNA, 17 bp, Homo Sapiens
aacagtttgccgctgcc

SEQ ID NO: 998 - DNA, 17 bp, Homo Sapiens
caacagtttgccgctgc

SEQ ID NO: 999 - DNA, 17 bp, Homo Sapiens
acaacagtttgccgctg

SEQ ID NO: 1000 - DNA, 17 bp, Homo Sapiens
gacaacagtttgccgct

SEQ ID NO: 1001 - DNA, 17 bp, Homo Sapiens
tgacaacagtttgccgc

SEQ ID NO: 1002 - DNA, 17 bp, Homo Sapiens
ctgacaacagtttgccg

SEQ ID NO: 1003 - DNA, 17 bp, Homo Sapiens
tctgacaacagtttgcc

SEQ ID NO: 1004 - DNA, 17 bp, Homo Sapiens
ttctgacaacagtttgc

SEQ ID NO: 1005 - DNA, 17 bp, Homo Sapiens
gttctgacaacagtttg

SEQ ID NO: 1006 - DNA, 17 bp, Homo Sapiens
tgttctgacaacagttt

SEQ ID NO: 1007 - DNA, 17 bp, Homo Sapiens
atgttctgacaacagtt

SEQ ID NO: 1008 - DNA, 17 bp, Homo Sapiens
aatgttctgacaacagt

SEQ ID NO: 1009 - DNA, 17 bp, Homo Sapiens
caatgttctgacaacag

SEQ ID NO: 1010 - DNA, 17 bp, Homo Sapiens
tcaatgttctgacaaca

SEQ ID NO: 1011 - DNA, 17 bp, Homo Sapiens
ttcaatgttctgacaac

SEQ ID NO: 1012 - DNA, 17 bp, Homo Sapiens
attcaatgttctgacaa

SEQ ID NO: 1013 - DNA, 17 bp, Homo Sapiens
cattcaatgttctgaca

SEQ ID NO: 1014 - DNA, 17 bp, Homo Sapiens
gcattcaatgttctgac

SEQ ID NO: 1015 - DNA, 17 bp, Homo Sapiens
tgcattcaatgttctga

SEQ ID NO: 1016 - DNA, 17 bp, Homo Sapiens
ttgcattcaatgttctg

SEQ ID NO: 1017 - DNA, 17 bp, Homo Sapiens
gttgcattcaatgttct

SEQ ID NO: 1018 - DNA, 18 bp, Homo Sapiens
caatgccatcctggagtt

SEQ ID NO: 1019 - DNA, 18 bp, Homo Sapiens
ccaatgccatcctggagt

SEQ ID NO: 1020 - DNA, 18 bp, Homo Sapiens
cccaatgccatcctggag

SEQ ID NO: 1021 - DNA, 18 bp, Homo Sapiens
gcccaatgccatcctgga

SEQ ID NO: 1022 - DNA, 18 bp, Homo Sapiens
tgcccaatgccatcctgg

SEQ ID NO: 1023 - DNA, 18 bp, Homo Sapiens
ctgcccaatgccatcctg

SEQ ID NO: 1024 - DNA, 18 bp, Homo Sapiens
gctgcccaatgccatcct

SEQ ID NO: 1025 - DNA, 18 bp, Homo Sapiens
cgctgcccaatgccatcc

SEQ ID NO: 1026 - DNA, 18 bp, Homo Sapiens
ccgctgcccaatgccatc

SEQ ID NO: 1027 - DNA, 18 bp, Homo Sapiens
gccgctgcccaatgccat

SEQ ID NO: 1028 - DNA, 18 bp, Homo Sapiens
tgccgctgcccaatgcca

SEQ ID NO: 1029 - DNA, 18 bp, Homo Sapiens
ttgccgctgcccaatgcc

SEQ ID NO: 1030 - DNA, 18 bp, Homo Sapiens
tttgccgctgcccaatgc

SEQ ID NO: 1031 - DNA, 18 bp, Homo Sapiens
gtttgccgctgcccaatg

SEQ ID NO: 1032 - DNA, 18 bp, Homo Sapiens
agtttgccgctgcccaat

SEQ ID NO: 1033 - DNA, 18 bp, Homo Sapiens
cagtttgccgctgcccaa

SEQ ID NO: 1034 - DNA, 18 bp, Homo Sapiens
acagtttgccgctgccca

SEQ ID NO: 1035 - DNA, 18 bp, Homo Sapiens
aacagtttgccgctgccc

SEQ ID NO: 1036 - DNA, 18 bp, Homo Sapiens
caacagtttgccgctgcc

SEQ ID NO: 1037 - DNA, 18 bp, Homo Sapiens
acaacagtttgccgctgc

SEQ ID NO: 1038 - DNA, 18 bp, Homo Sapiens
gacaacagtttgccgctg

SEQ ID NO: 1039 - DNA, 18 bp, Homo Sapiens
tgacaacagtttgccgct

SEQ ID NO: 1040 - DNA, 18 bp, Homo Sapiens
ctgacaacagtttgccgc

SEQ ID NO: 1041 - DNA, 18 bp, Homo Sapiens
tctgacaacagtttgccg

SEQ ID NO: 1042 - DNA, 18 bp, Homo Sapiens
ttctgacaacagtttgcc

SEQ ID NO: 1043 - DNA, 18 bp, Homo Sapiens
gttctgacaacagtttgc

SEQ ID NO: 1044 - DNA, 18 bp, Homo Sapiens
tgttctgacaacagtttg

SEQ ID NO: 1045 - DNA, 18 bp, Homo Sapiens
atgttctgacaacagttt

SEQ ID NO: 1046 - DNA, 18 bp, Homo Sapiens
aatgttctgacaacagtt

SEQ ID NO: 1047 - DNA, 18 bp, Homo Sapiens
caatgttctgacaacagt

SEQ ID NO: 1048 - DNA, 18 bp, Homo Sapiens
tcaatgttctgacaacag

SEQ ID NO: 1049 - DNA, 18 bp, Homo Sapiens
ttcaatgttctgacaaca

SEQ ID NO: 1050 - DNA, 18 bp, Homo Sapiens
attcaatgttctgacaac

SEQ ID NO: 1051 - DNA, 18 bp, Homo Sapiens
cattcaatgttctgacaa

SEQ ID NO: 1052 - DNA, 18 bp, Homo Sapiens
gcattcaatgttctgaca

SEQ ID NO: 1053 - DNA, 18 bp, Homo Sapiens
tgcattcaatgttctgac

SEQ ID NO: 1054 - DNA, 18 bp, Homo Sapiens
ttgcattcaatgttctga

SEQ ID NO: 1055 - DNA, 18 bp, Homo Sapiens
gttgcattcaatgttctg

SEQ ID NO: 1056 - DNA, 18 bp, Homo Sapiens
agttgcattcaatgttct

SEQ ID NO: 1057 - DNA, 19 bp, Homo Sapiens
caatgccatcctggagttc

SEQ ID NO: 1058 - DNA, 19 bp, Homo Sapiens
ccaatgccatcctggagtt

SEQ ID NO: 1059 - DNA, 19 bp, Homo Sapiens
cccaatgccatcctggagt

SEQ ID NO: 1060 - DNA, 19 bp, Homo Sapiens
gcccaatgccatcctggag

SEQ ID NO: 1061 - DNA, 19 bp, Homo Sapiens
tgcccaatgccatcctgga

SEQ ID NO: 1062 - DNA, 19 bp, Homo Sapiens
ctgcccaatgccatcctgg

SEQ ID NO: 1063 - DNA, 19 bp, Homo Sapiens
gctgcccaatgccatcctg

SEQ ID NO: 1064 - DNA, 19 bp, Homo Sapiens
cgctgcccaatgccatcct

SEQ ID NO: 1065 - DNA, 19 bp, Homo Sapiens
ccgctgcccaatgccatcc

SEQ ID NO: 1066 - DNA, 19 bp, Homo Sapiens
gccgctgcccaatgccatc

SEQ ID NO: 1067 - DNA, 19 bp, Homo Sapiens
tgccgctgcccaatgccat

SEQ ID NO: 1068 - DNA, 19 bp, Homo Sapiens
ttgccgctgcccaatgcca

SEQ ID NO: 1069 - DNA, 19 bp, Homo Sapiens
tttgccgctgcccaatgcc

SEQ ID NO: 1070 - DNA, 19 bp, Homo Sapiens
gtttgccgctgcccaatgc

SEQ ID NO: 1071 - DNA, 19 bp, Homo Sapiens
agtttgccgctgcccaatg

SEQ ID NO: 1072 - DNA, 19 bp, Homo Sapiens
cagtttgccgctgcccaat

SEQ ID NO: 1073 - DNA, 19 bp, Homo Sapiens
acagtttgccgctgcccaa

SEQ ID NO: 1074 - DNA, 19 bp, Homo Sapiens
aacagtttgccgctgccca

SEQ ID NO: 1075 - DNA, 19 bp, Homo Sapiens
caacagtttgccgctgccc

SEQ ID NO: 1076 - DNA, 19 bp, Homo Sapiens
acaacagtttgccgctgcc

SEQ ID NO: 1077 - DNA, 19 bp, Homo Sapiens
gacaacagtttgccgctgc

SEQ ID NO: 1078 - DNA, 19 bp, Homo Sapiens
tgacaacagtttgccgctg

SEQ ID NO: 1079 - DNA, 19 bp, Homo Sapiens
ctgacaacagtttgccgct

SEQ ID NO: 1080 - DNA, 19 bp, Homo Sapiens
tctgacaacagtttgccgc

SEQ ID NO: 1081 - DNA, 19 bp, Homo Sapiens
ttctgacaacagtttgccg

SEQ ID NO: 1082 - DNA, 19 bp, Homo Sapiens
gttctgacaacagtttgcc

SEQ ID NO: 1083 - DNA, 19 bp, Homo Sapiens
tgttctgacaacagtttgc

SEQ ID NO: 1084 - DNA, 19 bp, Homo Sapiens
atgttctgacaacagtttg

SEQ ID NO: 1085 - DNA, 19 bp, Homo Sapiens
aatgttctgacaacagttt

SEQ ID NO: 1086 - DNA, 19 bp, Homo Sapiens
caatgttctgacaacagtt

SEQ ID NO: 1087 - DNA, 19 bp, Homo Sapiens
tcaatgttctgacaacagt

SEQ ID NO: 1088 - DNA, 19 bp, Homo Sapiens
ttcaatgttctgacaacag

SEQ ID NO: 1089 - DNA, 19 bp, Homo Sapiens
attcaatgttctgacaaca

SEQ ID NO: 1090 - DNA, 19 bp, Homo Sapiens
cattcaatgttctgacaac

SEQ ID NO: 1091 - DNA, 19 bp, Homo Sapiens
gcattcaatgttctgacaa

SEQ ID NO: 1092 - DNA, 19 bp, Homo Sapiens
tgcattcaatgttctgaca

SEQ ID NO: 1093 - DNA, 19 bp, Homo Sapiens
ttgcattcaatgttctgac

SEQ ID NO: 1094 - DNA, 19 bp, Homo Sapiens
gttgcattcaatgttctga

SEQ ID NO: 1095 - DNA, 19 bp, Homo Sapiens
agttgcattcaatgttctg

SEQ ID NO: 1096 - DNA, 19 bp, Homo Sapiens
cagttgcattcaatgttct

SEQ ID NO: 1097 - DNA, 20 bp, Homo Sapiens
caatgccatcctggagttcc

SEQ ID NO: 1098 - DNA, 20 bp, Homo Sapiens
ccaatgccatcctggagttc

SEQ ID NO: 1099 - DNA, 20 bp, Homo Sapiens
cccaatgccatcctggagtt

SEQ ID NO: 1100 - DNA, 20 bp, Homo Sapiens
gcccaatgccatcctggagt

SEQ ID NO: 1101 - DNA, 20 bp, Homo Sapiens
tgcccaatgccatcctggag

SEQ ID NO: 1102 - DNA, 20 bp, Homo Sapiens
ctgcccaatgccatcctgga

SEQ ID NO: 1103 - DNA, 20 bp, Homo Sapiens
gctgcccaatgccatcctgg

SEQ ID NO: 1104 - DNA, 20 bp, Homo Sapiens
cgctgcccaatgccatcctg

SEQ ID NO: 1105 - DNA, 20 bp, Homo Sapiens
ccgctgcccaatgccatcct

SEQ ID NO: 1106 - DNA, 20 bp, Homo Sapiens
gccgctgcccaatgccatcc

SEQ ID NO: 1107 - DNA, 20 bp, Homo Sapiens
tgccgctgcccaatgccatc

SEQ ID NO: 1108 - DNA, 20 bp, Homo Sapiens
ttgccgctgcccaatgccat

SEQ ID NO: 1109 - DNA, 20 bp, Homo Sapiens
tttgccgctgcccaatgcca

SEQ ID NO: 1110 - DNA, 20 bp, Homo Sapiens
gtttgccgctgcccaatgcc

SEQ ID NO: 1111 - DNA, 20 bp, Homo Sapiens
agtttgccgctgcccaatgc

SEQ ID NO: 1112 - DNA, 20 bp, Homo Sapiens
cagtttgccgctgcccaatg

SEQ ID NO: 1113 - DNA, 20 bp, Homo Sapiens
acagtttgccgctgcccaat

SEQ ID NO: 1114 - DNA, 20 bp, Homo Sapiens
aacagtttgccgctgcccaa

SEQ ID NO: 1115 - DNA, 20 bp, Homo Sapiens
caacagtttgccgctgccca

SEQ ID NO: 1116 - DNA, 20 bp, Homo Sapiens
acaacagtttgccgctgccc

SEQ ID NO: 1117 - DNA, 20 bp, Homo Sapiens
gacaacagtttgccgctgcc

SEQ ID NO: 1118 - DNA, 20 bp, Homo Sapiens
tgacaacagtttgccgctgc

SEQ ID NO: 1119 - DNA, 20 bp, Homo Sapiens
ctgacaacagtttgccgctg

SEQ ID NO: 1120 - DNA, 20 bp, Homo Sapiens
tctgacaacagtttgccgct

SEQ ID NO: 1121 - DNA, 20 bp, Homo Sapiens
ttctgacaacagtttgccgc

SEQ ID NO: 1122 - DNA, 20 bp, Homo Sapiens
gttctgacaacagtttgccg

SEQ ID NO: 1123 - DNA, 20 bp, Homo Sapiens
tgttctgacaacagtttgcc

SEQ ID NO: 1124 - DNA, 20 bp, Homo Sapiens
atgttctgacaacagtttgc

SEQ ID NO: 1125 - DNA, 20 bp, Homo Sapiens
aatgttctgacaacagtttg

SEQ ID NO: 1126 - DNA, 20 bp, Homo Sapiens
caatgttctgacaacagttt

SEQ ID NO: 1127 - DNA, 20 bp, Homo Sapiens
tcaatgttctgacaacagtt

SEQ ID NO: 1128 - DNA, 20 bp, Homo Sapiens
ttcaatgttctgacaacagt

SEQ ID NO: 1129 - DNA, 20 bp, Homo Sapiens
attcaatgttctgacaacag

SEQ ID NO: 1130 - DNA, 20 bp, Homo Sapiens
cattcaatgttctgacaaca

SEQ ID NO: 1131 - DNA, 20 bp, Homo Sapiens
gcattcaatgttctgacaac

SEQ ID NO: 1132 - DNA, 20 bp, Homo Sapiens
tgcattcaatgttctgacaa

SEQ ID NO: 1133 - DNA, 20 bp, Homo Sapiens
ttgcattcaatgttctgaca

SEQ ID NO: 1134 - DNA, 20 bp, Homo Sapiens
gttgcattcaatgttctgac

SEQ ID NO: 1135 - DNA, 20 bp, Homo Sapiens
agttgcattcaatgttctga

SEQ ID NO: 1136 - DNA, 20 bp, Homo Sapiens
cagttgcattcaatgttctg

SEQ ID NO: 1137 - DNA, 20 bp, Homo Sapiens
ccagttgcattcaatgttct

SEQ ID NO: 1138 - DNA, 21 bp, Homo Sapiens
caatgccatcctggagttcct

SEQ ID NO: 1139 - DNA, 21 bp, Homo Sapiens
ccaatgccatcctggagttcc

SEQ ID NO: 1140 - DNA, 21 bp, Homo Sapiens
cccaatgccatcctggagttc

SEQ ID NO: 1141 - DNA, 21 bp, Homo Sapiens
gcccaatgccatcctggagtt

SEQ ID NO: 1142 - DNA, 21 bp, Homo Sapiens
tgcccaatgccatcctggagt

SEQ ID NO: 1143 - DNA, 21 bp, Homo Sapiens
ctgcccaatgccatcctggag

SEQ ID NO: 1144 - DNA, 21 bp, Homo Sapiens
gctgcccaatgccatcctgga

SEQ ID NO: 1145 - DNA, 21 bp, Homo Sapiens
cgctgcccaatgccatcctgg

SEQ ID NO: 1146 - DNA, 21 bp, Homo Sapiens
ccgctgcccaatgccatcctg

SEQ ID NO: 1147 - DNA, 21 bp, Homo Sapiens
gccgctgcccaatgccatcct

SEQ ID NO: 1148 - DNA, 21 bp, Homo Sapiens
tgccgctgcccaatgccatcc

SEQ ID NO: 1149 - DNA, 21 bp, Homo Sapiens
ttgccgctgcccaatgccatc

SEQ ID NO: 1150 - DNA, 21 bp, Homo Sapiens
tttgccgctgcccaatgccat

SEQ ID NO: 1151 - DNA, 21 bp, Homo Sapiens
gtttgccgctgcccaatgcca

SEQ ID NO: 1152 - DNA, 21 bp, Homo Sapiens
agtttgccgctgcccaatgcc

SEQ ID NO: 1153 - DNA, 21 bp, Homo Sapiens
cagtttgccgctgcccaatgc

SEQ ID NO: 1154 - DNA, 21 bp, Homo Sapiens
acagtttgccgctgcccaatg

SEQ ID NO: 1155 - DNA, 21 bp, Homo Sapiens
aacagtttgccgctgcccaat

SEQ ID NO: 1156 - DNA, 21 bp, Homo Sapiens
caacagtttgccgctgcccaa

SEQ ID NO: 1157 - DNA, 21 bp, Homo Sapiens
acaacagtttgccgctgccca

SEQ ID NO: 1158 - DNA, 21 bp, Homo Sapiens
gacaacagtttgccgctgccc

SEQ ID NO: 1159 - DNA, 21 bp, Homo Sapiens
tgacaacagtttgccgctgcc

SEQ ID NO: 1160 - DNA, 21 bp, Homo Sapiens
ctgacaacagtttgccgctgc

SEQ ID NO: 1161 - DNA, 21 bp, Homo Sapiens
tctgacaacagtttgccgctg

SEQ ID NO: 1162 - DNA, 21 bp, Homo Sapiens
ttctgacaacagtttgccgct

SEQ ID NO: 1163 - DNA, 21 bp, Homo Sapiens
gttctgacaacagtttgccgc

SEQ ID NO: 1164 - DNA, 21 bp, Homo Sapiens
tgttctgacaacagtttgccg

SEQ ID NO: 1165 - DNA, 21 bp, Homo Sapiens
atgttctgacaacagtttgcc

SEQ ID NO: 1166 - DNA, 21 bp, Homo Sapiens
aatgttctgacaacagtttgc

SEQ ID NO: 1167 - DNA, 21 bp, Homo Sapiens
caatgttctgacaacagtttg

SEQ ID NO: 1168 - DNA, 21 bp, Homo Sapiens
tcaatgttctgacaacagttt

SEQ ID NO: 1169 - DNA, 21 bp, Homo Sapiens
ttcaatgttctgacaacagtt

SEQ ID NO: 1170 - DNA, 21 bp, Homo Sapiens
attcaatgttctgacaacagt

SEQ ID NO: 1171 - DNA, 21 bp, Homo Sapiens
cattcaatgttctgacaacag

SEQ ID NO: 1172 - DNA, 21 bp, Homo Sapiens
gcattcaatgttctgacaaca

SEQ ID NO: 1173 - DNA, 21 bp, Homo Sapiens
tgcattcaatgttctgacaac

SEQ ID NO: 1174 - DNA, 21 bp, Homo Sapiens
ttgcattcaatgttctgacaa

SEQ ID NO: 1175 - DNA, 21 bp, Homo Sapiens
gttgcattcaatgttctgaca

SEQ ID NO: 1176 - DNA, 21 bp, Homo Sapiens
agttgcattcaatgttctgac

SEQ ID NO: 1177 - DNA, 21 bp, Homo Sapiens
cagttgcattcaatgttctga

SEQ ID NO: 1178 - DNA, 21 bp, Homo Sapiens
ccagttgcattcaatgttctg

SEQ ID NO: 1179 - DNA, 21 bp, Homo Sapiens
cccagttgcattcaatgttct

SEQ ID NO: 1180 - DNA, 22 bp, Homo Sapiens
caatgccatcctggagttcctg

SEQ ID NO: 1181 - DNA, 22 bp, Homo Sapiens
ccaatgccatcctggagttcct

SEQ ID NO: 1182 - DNA, 22 bp, Homo Sapiens
cccaatgccatcctggagttcc

SEQ ID NO: 1183 - DNA, 22 bp, Homo Sapiens
gcccaatgccatcctggagttc

SEQ ID NO: 1184 - DNA, 22 bp, Homo Sapiens
tgcccaatgccatcctggagtt

SEQ ID NO: 1185 - DNA, 22 bp, Homo Sapiens
ctgcccaatgccatcctggagt

SEQ ID NO: 1186 - DNA, 22 bp, Homo Sapiens
gctgcccaatgccatcctggag

SEQ ID NO: 1187 - DNA, 22 bp, Homo Sapiens
cgctgcccaatgccatcctgga

SEQ ID NO: 1188 - DNA, 22 bp, Homo Sapiens
ccgctgcccaatgccatcctgg

SEQ ID NO: 1189 - DNA, 22 bp, Homo Sapiens
gccgctgcccaatgccatcctg

SEQ ID NO: 1190 - DNA, 22 bp, Homo Sapiens
tgccgctgcccaatgccatcct

SEQ ID NO: 1191 - DNA, 22 bp, Homo Sapiens
ttgccgctgcccaatgccatcc

SEQ ID NO: 1192 - DNA, 22 bp, Homo Sapiens
tttgccgctgcccaatgccatc

SEQ ID NO: 1193 - DNA, 22 bp, Homo Sapiens
gtttgccgctgcccaatgccat

SEQ ID NO: 1194 - DNA, 22 bp, Homo Sapiens
agtttgccgctgcccaatgcca

SEQ ID NO: 1195 - DNA, 22 bp, Homo Sapiens
cagtttgccgctgcccaatgcc

SEQ ID NO: 1196 - DNA, 22 bp, Homo Sapiens
acagtttgccgctgcccaatgc

SEQ ID NO: 1197 - DNA, 22 bp, Homo Sapiens
aacagtttgccgctgcccaatg

SEQ ID NO: 1198 - DNA, 22 bp, Homo Sapiens
caacagtttgccgctgcccaat

SEQ ID NO: 1199 - DNA, 22 bp, Homo Sapiens
acaacagtttgccgctgcccaa

SEQ ID NO: 1200 - DNA, 22 bp, Homo Sapiens
gacaacagtttgccgctgccca

SEQ ID NO: 1201 - DNA, 22 bp, Homo Sapiens
tgacaacagtttgccgctgccc

SEQ ID NO: 1202 - DNA, 22 bp, Homo Sapiens
ctgacaacagtttgccgctgcc

SEQ ID NO: 1203 - DNA, 22 bp, Homo Sapiens
tctgacaacagtttgccgctgc

SEQ ID NO: 1204 - DNA, 22 bp, Homo Sapiens
ttctgacaacagtttgccgctg

SEQ ID NO: 1205 - DNA, 22 bp, Homo Sapiens
gttctgacaacagtttgccgct

SEQ ID NO: 1206 - DNA, 22 bp, Homo Sapiens
tgttctgacaacagtttgccgc

SEQ ID NO: 1207 - DNA, 22 bp, Homo Sapiens
atgttctgacaacagtttgccg

SEQ ID NO: 1208 - DNA, 22 bp, Homo Sapiens
aatgttctgacaacagtttgcc

SEQ ID NO: 1209 - DNA, 22 bp, Homo Sapiens
caatgttctgacaacagtttgc

SEQ ID NO: 1210 - DNA, 22 bp, Homo Sapiens
tcaatgttctgacaacagtttg

SEQ ID NO: 1211 - DNA, 22 bp, Homo Sapiens
ttcaatgttctgacaacagttt

SEQ ID NO: 1212 - DNA, 22 bp, Homo Sapiens
attcaatgttctgacaacagtt

SEQ ID NO: 1213 - DNA, 22 bp, Homo Sapiens
cattcaatgttctgacaacagt

SEQ ID NO: 1214 - DNA, 22 bp, Homo Sapiens
gcattcaatgttctgacaacag

SEQ ID NO: 1215 - DNA, 22 bp, Homo Sapiens
tgcattcaatgttctgacaaca

SEQ ID NO: 1216 - DNA, 22 bp, Homo Sapiens
ttgcattcaatgttctgacaac

SEQ ID NO: 1217 - DNA, 22 bp, Homo Sapiens
gttgcattcaatgttctgacaa

SEQ ID NO: 1218 - DNA, 22 bp, Homo Sapiens
agttgcattcaatgttctgaca

SEQ ID NO: 1219 - DNA, 22 bp, Homo Sapiens
cagttgcattcaatgttctgac

SEQ ID NO: 1220 - DNA, 22 bp, Homo Sapiens
ccagttgcattcaatgttctga

SEQ ID NO: 1221 - DNA, 22 bp, Homo Sapiens
cccagttgcattcaatgttctg

SEQ ID NO: 1222 - DNA, 22 bp, Homo Sapiens
ccccagttgcattcaatgttct

SEQ ID NO: 1223 - DNA, 23 bp, Homo Sapiens
caatgccatcctggagttcctgt

SEQ ID NO: 1224 - DNA, 23 bp, Homo Sapiens
ccaatgccatcctggagttcctg

SEQ ID NO: 1225 - DNA, 23 bp, Homo Sapiens
cccaatgccatcctggagttcct

SEQ ID NO: 1226 - DNA, 23 bp, Homo Sapiens
gcccaatgccatcctggagttcc

SEQ ID NO: 1227 - DNA, 23 bp, Homo Sapiens
tgcccaatgccatcctggagttc

SEQ ID NO: 1228 - DNA, 23 bp, Homo Sapiens
ctgcccaatgccatcctggagtt

SEQ ID NO: 1229 - DNA, 23 bp, Homo Sapiens
gctgcccaatgccatcctggagt

SEQ ID NO: 1230 - DNA, 23 bp, Homo Sapiens
cgctgcccaatgccatcctggag

SEQ ID NO: 1231 - DNA, 23 bp, Homo Sapiens
ccgctgcccaatgccatcctgga

SEQ ID NO: 1232 - DNA, 23 bp, Homo Sapiens
gccgctgcccaatgccatcctgg

SEQ ID NO: 1233 - DNA, 23 bp, Homo Sapiens
tgccgctgcccaatgccatcctg

SEQ ID NO: 1234 - DNA, 23 bp, Homo Sapiens
ttgccgctgcccaatgccatcct

SEQ ID NO: 1235 - DNA, 23 bp, Homo Sapiens
tttgccgctgcccaatgccatcc

SEQ ID NO: 1236 - DNA, 23 bp, Homo Sapiens
gtttgccgctgcccaatgccatc

SEQ ID NO: 1237 - DNA, 23 bp, Homo Sapiens
agtttgccgctgcccaatgccat

SEQ ID NO: 1238 - DNA, 23 bp, Homo Sapiens
cagtttgccgctgcccaatgcca

SEQ ID NO: 1239 - DNA, 23 bp, Homo Sapiens
acagtttgccgctgcccaatgcc

SEQ ID NO: 1240 - DNA, 23 bp, Homo Sapiens
aacagtttgccgctgcccaatgc

SEQ ID NO: 1241 - DNA, 23 bp, Homo Sapiens
caacagtttgccgctgcccaatg

SEQ ID NO: 1242 - DNA, 23 bp, Homo Sapiens
acaacagtttgccgctgcccaat

SEQ ID NO: 1243 - DNA, 23 bp, Homo Sapiens
gacaacagtttgccgctgcccaa

SEQ ID NO: 1244 - DNA, 23 bp, Homo Sapiens
tgacaacagtttgccgctgccca

SEQ ID NO: 1245 - DNA, 23 bp, Homo Sapiens
ctgacaacagtttgccgctgccc

SEQ ID NO: 1246 - DNA, 23 bp, Homo Sapiens
tctgacaacagtttgccgctgcc

SEQ ID NO: 1247 - DNA, 23 bp, Homo Sapiens
ttctgacaacagtttgccgctgc

SEQ ID NO: 1248 - DNA, 23 bp, Homo Sapiens
gttctgacaacagtttgccgctg

SEQ ID NO: 1249 - DNA, 23 bp, Homo Sapiens
tgttctgacaacagtttgccgct

SEQ ID NO: 1250 - DNA, 23 bp, Homo Sapiens
atgttctgacaacagtttgccgc

SEQ ID NO: 1251 - DNA, 23 bp, Homo Sapiens
aatgttctgacaacagtttgccg

SEQ ID NO: 1252 - DNA, 23 bp, Homo Sapiens
caatgttctgacaacagtttgcc

SEQ ID NO: 1253 - DNA, 23 bp, Homo Sapiens
tcaatgttctgacaacagtttgc

SEQ ID NO: 1254 - DNA, 23 bp, Homo Sapiens
ttcaatgttctgacaacagtttg

SEQ ID NO: 1255 - DNA, 23 bp, Homo Sapiens
attcaatgttctgacaacagttt

SEQ ID NO: 1256 - DNA, 23 bp, Homo Sapiens
cattcaatgttctgacaacagtt

SEQ ID NO: 1257 - DNA, 23 bp, Homo Sapiens
gcattcaatgttctgacaacagt

SEQ ID NO: 1258 - DNA, 23 bp, Homo Sapiens
tgcattcaatgttctgacaacag

SEQ ID NO: 1259 - DNA, 23 bp, Homo Sapiens
ttgcattcaatgttctgacaaca

SEQ ID NO: 1260 - DNA, 23 bp, Homo Sapiens
gttgcattcaatgttctgacaac

SEQ ID NO: 1261 - DNA, 23 bp, Homo Sapiens
agttgcattcaatgttctgacaa

SEQ ID NO: 1262 - DNA, 23 bp, Homo Sapiens
cagttgcattcaatgttctgaca

SEQ ID NO: 1263 - DNA, 23 bp, Homo Sapiens
ccagttgcattcaatgttctgac

SEQ ID NO: 1264 - DNA, 23 bp, Homo Sapiens
cccagttgcattcaatgttctga

SEQ ID NO: 1265 - DNA, 23 bp, Homo Sapiens
ccccagttgcattcaatgttctg

SEQ ID NO: 1266 - DNA, 23 bp, Homo Sapiens
tccccagttgcattcaatgttct

SEQ ID NO: 1267 - DNA, 24 bp, Homo Sapiens
caatgccatcctggagttcctgta

SEQ ID NO: 1268 - DNA, 24 bp, Homo Sapiens
ccaatgccatcctggagttcctgt

SEQ ID NO: 1269 - DNA, 24 bp, Homo Sapiens
cccaatgccatcctggagttcctg

SEQ ID NO: 1270 - DNA, 24 bp, Homo Sapiens
gcccaatgccatcctggagttcct

SEQ ID NO: 1271 - DNA, 24 bp, Homo Sapiens
tgcccaatgccatcctggagttcc

SEQ ID NO: 1272 - DNA, 24 bp, Homo Sapiens
ctgcccaatgccatcctggagttc

SEQ ID NO: 1273 - DNA, 24 bp, Homo Sapiens
gctgcccaatgccatcctggagtt

SEQ ID NO: 1274 - DNA, 24 bp, Homo Sapiens
cgctgcccaatgccatcctggagt

SEQ ID NO: 1275 - DNA, 24 bp, Homo Sapiens
ccgctgcccaatgccatcctggag

SEQ ID NO: 1276 - DNA, 24 bp, Homo Sapiens
gccgctgcccaatgccatcctgga

SEQ ID NO: 1277 - DNA, 24 bp, Homo Sapiens
tgccgctgcccaatgccatcctgg

SEQ ID NO: 1278 - DNA, 24 bp, Homo Sapiens
ttgccgctgcccaatgccatcctg

SEQ ID NO: 1279 - DNA, 24 bp, Homo Sapiens
tttgccgctgcccaatgccatcct

SEQ ID NO: 1280 - DNA, 24 bp, Homo Sapiens
gtttgccgctgcccaatgccatcc

SEQ ID NO: 1281 - DNA, 24 bp, Homo Sapiens
agtttgccgctgcccaatgccatc

SEQ ID NO: 1282 - DNA, 24 bp, Homo Sapiens
cagtttgccgctgcccaatgccat

SEQ ID NO: 1283 - DNA, 24 bp, Homo Sapiens
acagtttgccgctgcccaatgcca

SEQ ID NO: 1284 - DNA, 24 bp, Homo Sapiens
aacagtttgccgctgcccaatgcc

SEQ ID NO: 1285 - DNA, 24 bp, Homo Sapiens
caacagtttgccgctgcccaatgc

SEQ ID NO: 1286 - DNA, 24 bp, Homo Sapiens
acaacagtttgccgctgcccaatg

SEQ ID NO: 1287 - DNA, 24 bp, Homo Sapiens
gacaacagtttgccgctgcccaat

SEQ ID NO: 1288 - DNA, 24 bp, Homo Sapiens
tgacaacagtttgccgctgcccaa

SEQ ID NO: 1289 - DNA, 24 bp, Homo Sapiens
ctgacaacagtttgccgctgccca

SEQ ID NO: 1290 - DNA, 24 bp, Homo Sapiens
tctgacaacagtttgccgctgccc

SEQ ID NO: 1291 - DNA, 24 bp, Homo Sapiens
ttctgacaacagtttgccgctgcc

SEQ ID NO: 1292 - DNA, 24 bp, Homo Sapiens
gttctgacaacagtttgccgctgc

SEQ ID NO: 1293 - DNA, 24 bp, Homo Sapiens
tgttctgacaacagtttgccgctg

SEQ ID NO: 1294 - DNA, 24 bp, Homo Sapiens
atgttctgacaacagtttgccgct

SEQ ID NO: 1295 - DNA, 24 bp, Homo Sapiens
aatgttctgacaacagtttgccgc

SEQ ID NO: 1296 - DNA, 24 bp, Homo Sapiens
caatgttctgacaacagtttgccg

SEQ ID NO: 1297 - DNA, 24 bp, Homo Sapiens
tcaatgttctgacaacagtttgcc

SEQ ID NO: 1298 - DNA, 24 bp, Homo Sapiens
ttcaatgttctgacaacagtttgc

SEQ ID NO: 1299 - DNA, 24 bp, Homo Sapiens
attcaatgttctgacaacagtttg

SEQ ID NO: 1300 - DNA, 24 bp, Homo Sapiens
cattcaatgttctgacaacagttt

SEQ ID NO: 1301 - DNA, 24 bp, Homo Sapiens
gcattcaatgttctgacaacagtt

SEQ ID NO: 1302 - DNA, 24 bp, Homo Sapiens
tgcattcaatgttctgacaacagt

SEQ ID NO: 1303 - DNA, 24 bp, Homo Sapiens
ttgcattcaatgttctgacaacag

SEQ ID NO: 1304 - DNA, 24 bp, Homo Sapiens
gttgcattcaatgttctgacaaca

SEQ ID NO: 1305 - DNA, 24 bp, Homo Sapiens
agttgcattcaatgttctgacaac

SEQ ID NO: 1306 - DNA, 24 bp, Homo Sapiens
cagttgcattcaatgttctgacaa

SEQ ID NO: 1307 - DNA, 24 bp, Homo Sapiens
ccagttgcattcaatgttctgaca

SEQ ID NO: 1308 - DNA, 24 bp, Homo Sapiens
cccagttgcattcaatgttctgac

SEQ ID NO: 1309 - DNA, 24 bp, Homo Sapiens
ccccagttgcattcaatgttctga

SEQ ID NO: 1310 - DNA, 24 bp, Homo Sapiens
tccccagttgcattcaatgttctg

SEQ ID NO: 1311 - DNA, 24 bp, Homo Sapiens
ttccccagttgcattcaatgttct

SEQ ID NO: 1312 - DNA, 25 bp, Homo Sapiens
caatgccatcctggagttcctgtaa

SEQ ID NO: 1313 - DNA, 25 bp, Homo Sapiens
ccaatgccatcctggagttcctgta

SEQ ID NO: 1314 - DNA, 25 bp, Homo Sapiens
cccaatgccatcctggagttcctgt

SEQ ID NO: 1315 - DNA, 25 bp, Homo Sapiens
gcccaatgccatcctggagttcctg

SEQ ID NO: 1316 - DNA, 25 bp, Homo Sapiens
tgcccaatgccatcctggagttcct

SEQ ID NO: 1317 - DNA, 25 bp, Homo Sapiens
ctgcccaatgccatcctggagttcc

SEQ ID NO: 1318 - DNA, 25 bp, Homo Sapiens
gctgcccaatgccatcctggagttc

SEQ ID NO: 1319 - DNA, 25 bp, Homo Sapiens
cgctgcccaatgccatcctggagtt

SEQ ID NO: 1320 - DNA, 25 bp, Homo Sapiens
ccgctgcccaatgccatcctggagt

SEQ ID NO: 1321 - DNA, 25 bp, Homo Sapiens
gccgctgcccaatgccatcctggag

SEQ ID NO: 1322 - DNA, 25 bp, Homo Sapiens
tgccgctgcccaatgccatcctgga

SEQ ID NO: 1323 - DNA, 25 bp, Homo Sapiens
ttgccgctgcccaatgccatcctgg

SEQ ID NO: 1324 - DNA, 25 bp, Homo Sapiens
tttgccgctgcccaatgccatcctg

SEQ ID NO: 1325 - DNA, 25 bp, Homo Sapiens
gtttgccgctgcccaatgccatcct

SEQ ID NO: 1326 - DNA, 25 bp, Homo Sapiens
agtttgccgctgcccaatgccatcc

SEQ ID NO: 1327 - DNA, 25 bp, Homo Sapiens
cagtttgccgctgcccaatgccatc

SEQ ID NO: 1328 - DNA, 25 bp, Homo Sapiens
acagtttgccgctgcccaatgccat

SEQ ID NO: 1329 - DNA, 25 bp, Homo Sapiens
aacagtttgccgctgcccaatgcca

SEQ ID NO: 1330 - DNA, 25 bp, Homo Sapiens
caacagtttgccgctgcccaatgcc

SEQ ID NO: 1331 - DNA, 25 bp, Homo Sapiens
acaacagtttgccgctgcccaatgc

SEQ ID NO: 1332 - DNA, 25 bp, Homo Sapiens
gacaacagtttgccgctgcccaatg

SEQ ID NO: 1333 - DNA, 25 bp, Homo Sapiens
tgacaacagtttgccgctgcccaat

SEQ ID NO: 1334 - DNA, 25 bp, Homo Sapiens
ctgacaacagtttgccgctgcccaa

SEQ ID NO: 1335 - DNA, 25 bp, Homo Sapiens
tctgacaacagtttgccgctgccca

SEQ ID NO: 1336 - DNA, 25 bp, Homo Sapiens
ttctgacaacagtttgccgctgccc

SEQ ID NO: 1337 - DNA, 25 bp, Homo Sapiens
gttctgacaacagtttgccgctgcc

SEQ ID NO: 1338 - DNA, 25 bp, Homo Sapiens
tgttctgacaacagtttgccgctgc

SEQ ID NO: 1339 - DNA, 25 bp, Homo Sapiens
atgttctgacaacagtttgccgctg

SEQ ID NO: 1340 - DNA, 25 bp, Homo Sapiens
aatgttctgacaacagtttgccgct

SEQ ID NO: 1341 - DNA, 25 bp, Homo Sapiens
caatgttctgacaacagtttgccgc

SEQ ID NO: 1342 - DNA, 25 bp, Homo Sapiens
tcaatgttctgacaacagtttgccg

SEQ ID NO: 1343 - DNA, 25 bp, Homo Sapiens
ttcaatgttctgacaacagtttgcc

SEQ ID NO: 1344 - DNA, 25 bp, Homo Sapiens
attcaatgttctgacaacagtttgc

SEQ ID NO: 1345 - DNA, 25 bp, Homo Sapiens
cattcaatgttctgacaacagtttg

SEQ ID NO: 1346 - DNA, 25 bp, Homo Sapiens
gcattcaatgttctgacaacagttt

SEQ ID NO: 1347 - DNA, 25 bp, Homo Sapiens
tgcattcaatgttctgacaacagtt

SEQ ID NO: 1348 - DNA, 25 bp, Homo Sapiens
ttgcattcaatgttctgacaacagt

SEQ ID NO: 1349 - DNA, 25 bp, Homo Sapiens
gttgcattcaatgttctgacaacag

SEQ ID NO: 1350 - DNA, 25 bp, Homo Sapiens
agttgcattcaatgttctgacaaca

SEQ ID NO: 1351 - DNA, 25 bp, Homo Sapiens
cagttgcattcaatgttctgacaac

SEQ ID NO: 1352 - DNA, 25 bp, Homo Sapiens
ccagttgcattcaatgttctgacaa

SEQ ID NO: 1353 - DNA, 25 bp, Homo Sapiens
cccagttgcattcaatgttctgaca

SEQ ID NO: 1354 - DNA, 25 bp, Homo Sapiens
ccccagttgcattcaatgttctgac

SEQ ID NO: 1355 - DNA, 25 bp, Homo Sapiens
tccccagttgcattcaatgttctga

SEQ ID NO: 1356 - DNA, 25 bp, Homo Sapiens
ttccccagttgcattcaatgttctg

SEQ ID NO: 1357 - DNA, 25 bp, Homo Sapiens
cttccccagttgcattcaatgttct

SEQ ID NO: 1358 - DNA, 26 bp, Homo Sapiens
caatgccatcctggagttcctgtaag

SEQ ID NO: 1359 - DNA, 26 bp, Homo Sapiens
ccaatgccatcctggagttcctgtaa

SEQ ID NO: 1360 - DNA, 26 bp, Homo Sapiens
cccaatgccatcctggagttcctgta

SEQ ID NO: 1361 - DNA, 26 bp, Homo Sapiens
gcccaatgccatcctggagttcctgt

SEQ ID NO: 1362 - DNA, 26 bp, Homo Sapiens
tgcccaatgccatcctggagttcctg

SEQ ID NO: 1363 - DNA, 26 bp, Homo Sapiens
ctgcccaatgccatcctggagttcct

SEQ ID NO: 1364 - DNA, 26 bp, Homo Sapiens
gctgcccaatgccatcctggagttcc

SEQ ID NO: 1365 - DNA, 26 bp, Homo Sapiens
cgctgcccaatgccatcctggagttc

SEQ ID NO: 1366 - DNA, 26 bp, Homo Sapiens
ccgctgcccaatgccatcctggagtt

SEQ ID NO: 1367 - DNA, 26 bp, Homo Sapiens
gccgctgcccaatgccatcctggagt

SEQ ID NO: 1368 - DNA, 26 bp, Homo Sapiens
tgccgctgcccaatgccatcctggag

SEQ ID NO: 1369 - DNA, 26 bp, Homo Sapiens
ttgccgctgcccaatgccatcctgga

SEQ ID NO: 1370 - DNA, 26 bp, Homo Sapiens
tttgccgctgcccaatgccatcctgg

SEQ ID NO: 1371 - DNA, 26 bp, Homo Sapiens
gtttgccgctgcccaatgccatcctg

SEQ ID NO: 1372 - DNA, 26 bp, Homo Sapiens
agtttgccgctgcccaatgccatcct

SEQ ID NO: 1373 - DNA, 26 bp, Homo Sapiens
cagtttgccgctgcccaatgccatcc

SEQ ID NO: 1374 - DNA, 26 bp, Homo Sapiens
acagtttgccgctgcccaatgccatc

SEQ ID NO: 1375 - DNA, 26 bp, Homo Sapiens
aacagtttgccgctgcccaatgccat

SEQ ID NO: 1376 - DNA, 26 bp, Homo Sapiens
caacagtttgccgctgcccaatgcca

SEQ ID NO: 1377 - DNA, 26 bp, Homo Sapiens
acaacagtttgccgctgcccaatgcc

SEQ ID NO: 1378 - DNA, 26 bp, Homo Sapiens
gacaacagtttgccgctgcccaatgc

SEQ ID NO: 1379 - DNA, 26 bp, Homo Sapiens
tgacaacagtttgccgctgcccaatg

SEQ ID NO: 1380 - DNA, 26 bp, Homo Sapiens
ctgacaacagtttgccgctgcccaat

SEQ ID NO: 1381 - DNA, 26 bp, Homo Sapiens
tctgacaacagtttgccgctgcccaa

SEQ ID NO: 1382 - DNA, 26 bp, Homo Sapiens
ttctgacaacagtttgccgctgccca

SEQ ID NO: 1383 - DNA, 26 bp, Homo Sapiens
gttctgacaacagtttgccgctgccc

SEQ ID NO: 1384 - DNA, 26 bp, Homo Sapiens
tgttctgacaacagtttgccgctgcc

SEQ ID NO: 1385 - DNA, 26 bp, Homo Sapiens
atgttctgacaacagtttgccgctgc

SEQ ID NO: 1386 - DNA, 26 bp, Homo Sapiens
aatgttctgacaacagtttgccgctg

SEQ ID NO: 1387 - DNA, 26 bp, Homo Sapiens
caatgttctgacaacagtttgccgct

SEQ ID NO: 1388 - DNA, 26 bp, Homo Sapiens
tcaatgttctgacaacagtttgccgc

SEQ ID NO: 1389 - DNA, 26 bp, Homo Sapiens
ttcaatgttctgacaacagtttgccg

SEQ ID NO: 1390 - DNA, 26 bp, Homo Sapiens
attcaatgttctgacaacagtttgcc

SEQ ID NO: 1391 - DNA, 26 bp, Homo Sapiens
cattcaatgttctgacaacagtttgc

SEQ ID NO: 1392 - DNA, 26 bp, Homo Sapiens
gcattcaatgttctgacaacagtttg

SEQ ID NO: 1393 - DNA, 26 bp, Homo Sapiens
tgcattcaatgttctgacaacagttt

SEQ ID NO: 1394 - DNA, 26 bp, Homo Sapiens
ttgcattcaatgttctgacaacagtt

SEQ ID NO: 1395 - DNA, 26 bp, Homo Sapiens
gttgcattcaatgttctgacaacagt

SEQ ID NO: 1396 - DNA, 26 bp, Homo Sapiens
agttgcattcaatgttctgacaacag

SEQ ID NO: 1397 - DNA, 26 bp, Homo Sapiens
cagttgcattcaatgttctgacaaca

SEQ ID NO: 1398 - DNA, 26 bp, Homo Sapiens
ccagttgcattcaatgttctgacaac

SEQ ID NO: 1399 - DNA, 26 bp, Homo Sapiens
cccagttgcattcaatgttctgacaa

SEQ ID NO: 1400 - DNA, 26 bp, Homo Sapiens
ccccagttgcattcaatgttctgaca

SEQ ID NO: 1401 - DNA, 26 bp, Homo Sapiens
tccccagttgcattcaatgttctgac

SEQ ID NO: 1402 - DNA, 26 bp, Homo Sapiens
ttccccagttgcattcaatgttctga

SEQ ID NO: 1403 - DNA, 26 bp, Homo Sapiens
cttccccagttgcattcaatgttctg

SEQ ID NO: 1404 - DNA, 26 bp, Homo Sapiens
tcttccccagttgcattcaatgttct

SEQ ID NO: 1405 - DNA, 27 bp, Homo Sapiens
caatgccatcctggagttcctgtaaga

SEQ ID NO: 1406 - DNA, 27 bp, Homo Sapiens
ccaatgccatcctggagttcctgtaag

SEQ ID NO: 1407 - DNA, 27 bp, Homo Sapiens
cccaatgccatcctggagttcctgtaa

SEQ ID NO: 1408 - DNA, 27 bp, Homo Sapiens
gcccaatgccatcctggagttcctgta

SEQ ID NO: 1409 - DNA, 27 bp, Homo Sapiens
tgcccaatgccatcctggagttcctgt

SEQ ID NO: 1410 - DNA, 27 bp, Homo Sapiens
ctgcccaatgccatcctggagttcctg

SEQ ID NO: 1411 - DNA, 27 bp, Homo Sapiens
gctgcccaatgccatcctggagttcct

SEQ ID NO: 1412 - DNA, 27 bp, Homo Sapiens
cgctgcccaatgccatcctggagttcc

SEQ ID NO: 1413 - DNA, 27 bp, Homo Sapiens
ccgctgcccaatgccatcctggagttc

SEQ ID NO: 1414 - DNA, 27 bp, Homo Sapiens
gccgctgcccaatgccatcctggagtt

SEQ ID NO: 1415 - DNA, 27 bp, Homo Sapiens
tgccgctgcccaatgccatcctggagt

SEQ ID NO: 1416 - DNA, 27 bp, Homo Sapiens
ttgccgctgcccaatgccatcctggag

SEQ ID NO: 1417 - DNA, 27 bp, Homo Sapiens
tttgccgctgcccaatgccatcctgga

SEQ ID NO: 1418 - DNA, 27 bp, Homo Sapiens
gtttgccgctgcccaatgccatcctgg

SEQ ID NO: 1419 - DNA, 27 bp, Homo Sapiens
agtttgccgctgcccaatgccatcctg

SEQ ID NO: 1420 - DNA, 27 bp, Homo Sapiens
cagtttgccgctgcccaatgccatcct

SEQ ID NO: 1421 - DNA, 27 bp, Homo Sapiens
acagtttgccgctgcccaatgccatcc

SEQ ID NO: 1422 - DNA, 27 bp, Homo Sapiens
aacagtttgccgctgcccaatgccatc

SEQ ID NO: 1423 - DNA, 27 bp, Homo Sapiens
caacagtttgccgctgcccaatgccat

SEQ ID NO: 1424 - DNA, 27 bp, Homo Sapiens
acaacagtttgccgctgcccaatgcca

SEQ ID NO: 1425 - DNA, 27 bp, Homo Sapiens
gacaacagtttgccgctgcccaatgcc

SEQ ID NO: 1426 - DNA, 27 bp, Homo Sapiens
tgacaacagtttgccgctgcccaatgc

SEQ ID NO: 1427 - DNA, 27 bp, Homo Sapiens
ctgacaacagtttgccgctgcccaatg

SEQ ID NO: 1428 - DNA, 27 bp, Homo Sapiens
tctgacaacagtttgccgctgcccaat

SEQ ID NO: 1429 - DNA, 27 bp, Homo Sapiens
ttctgacaacagtttgccgctgcccaa

SEQ ID NO: 1430 - DNA, 27 bp, Homo Sapiens
gttctgacaacagtttgccgctgccca

SEQ ID NO: 1431 - DNA, 27 bp, Homo Sapiens
tgttctgacaacagtttgccgctgccc

SEQ ID NO: 1432 - DNA, 27 bp, Homo Sapiens
atgttctgacaacagtttgccgctgcc

SEQ ID NO: 1433 - DNA, 27 bp, Homo Sapiens
aatgttctgacaacagtttgccgctgc

SEQ ID NO: 1434 - DNA, 27 bp, Homo Sapiens
caatgttctgacaacagtttgccgctg

SEQ ID NO: 1435 - DNA, 27 bp, Homo Sapiens
tcaatgttctgacaacagtttgccgct

SEQ ID NO: 1436 - DNA, 27 bp, Homo Sapiens
ttcaatgttctgacaacagtttgccgc

SEQ ID NO: 1437 - DNA, 27 bp, Homo Sapiens
attcaatgttctgacaacagtttgccg

SEQ ID NO: 1438 - DNA, 27 bp, Homo Sapiens
cattcaatgttctgacaacagtttgcc

SEQ ID NO: 1439 - DNA, 27 bp, Homo Sapiens
gcattcaatgttctgacaacagtttgc

SEQ ID NO: 1440 - DNA, 27 bp, Homo Sapiens
tgcattcaatgttctgacaacagtttg

SEQ ID NO: 1441 - DNA, 27 bp, Homo Sapiens
ttgcattcaatgttctgacaacagttt

SEQ ID NO: 1442 - DNA, 27 bp, Homo Sapiens
gttgcattcaatgttctgacaacagtt

SEQ ID NO: 1443 - DNA, 27 bp, Homo Sapiens
agttgcattcaatgttctgacaacagt

SEQ ID NO: 1444 - DNA, 27 bp, Homo Sapiens
cagttgcattcaatgttctgacaacag

SEQ ID NO: 1445 - DNA, 27 bp, Homo Sapiens
ccagttgcattcaatgttctgacaaca

SEQ ID NO: 1446 - DNA, 27 bp, Homo Sapiens
cccagttgcattcaatgttctgacaac

SEQ ID NO: 1447 - DNA, 27 bp, Homo Sapiens
ccccagttgcattcaatgttctgacaa

SEQ ID NO: 1448 - DNA, 27 bp, Homo Sapiens
tccccagttgcattcaatgttctgaca

SEQ ID NO: 1449 - DNA, 27 bp, Homo Sapiens
ttccccagttgcattcaatgttctgac

SEQ ID NO: 1450 - DNA, 27 bp, Homo Sapiens
cttccccagttgcattcaatgttctga

SEQ ID NO: 1451 - DNA, 27 bp, Homo Sapiens
tcttccccagttgcattcaatgttctg

SEQ ID NO: 1452 - DNA, 27 bp, Homo Sapiens
ttcttccccagttgcattcaatgttct

SEQ ID NO: 1453 - DNA, 28 bp, Homo Sapiens
caatgccatcctggagttcctgtaagat

SEQ ID NO: 1454 - DNA, 28 bp, Homo Sapiens
ccaatgccatcctggagttcctgtaaga

SEQ ID NO: 1455 - DNA, 28 bp, Homo Sapiens
cccaatgccatcctggagttcctgtaag

SEQ ID NO: 1456 - DNA, 28 bp, Homo Sapiens
gcccaatgccatcctggagttcctgtaa

SEQ ID NO: 1457 - DNA, 28 bp, Homo Sapiens
tgcccaatgccatcctggagttcctgta

SEQ ID NO: 1458 - DNA, 28 bp, Homo Sapiens
ctgcccaatgccatcctggagttcctgt

SEQ ID NO: 1459 - DNA, 28 bp, Homo Sapiens
gctgcccaatgccatcctggagttcctg

SEQ ID NO: 1460 - DNA, 28 bp, Homo Sapiens
cgctgcccaatgccatcctggagttcct

SEQ ID NO: 1461 - DNA, 28 bp, Homo Sapiens
ccgctgcccaatgccatcctggagttcc

SEQ ID NO: 1462 - DNA, 28 bp, Homo Sapiens
gccgctgcccaatgccatcctggagttc

SEQ ID NO: 1463 - DNA, 28 bp, Homo Sapiens
tgccgctgcccaatgccatcctggagtt

SEQ ID NO: 1464 - DNA, 28 bp, Homo Sapiens
ttgccgctgcccaatgccatcctggagt

SEQ ID NO: 1465 - DNA, 28 bp, Homo Sapiens
tttgccgctgcccaatgccatcctggag

SEQ ID NO: 1466 - DNA, 28 bp, Homo Sapiens
gtttgccgctgcccaatgccatcctgga

SEQ ID NO: 1467 - DNA, 28 bp, Homo Sapiens
agtttgccgctgcccaatgccatcctgg

SEQ ID NO: 1468 - DNA, 28 bp, Homo Sapiens
cagtttgccgctgcccaatgccatcctg

SEQ ID NO: 1469 - DNA, 28 bp, Homo Sapiens
acagtttgccgctgcccaatgccatcct

SEQ ID NO: 1470 - DNA, 28 bp, Homo Sapiens
aacagtttgccgctgcccaatgccatcc

SEQ ID NO: 1471 - DNA, 28 bp, Homo Sapiens
caacagtttgccgctgcccaatgccatc

SEQ ID NO: 1472 - DNA, 28 bp, Homo Sapiens
acaacagtttgccgctgcccaatgccat

SEQ ID NO: 1473 - DNA, 28 bp, Homo Sapiens
gacaacagtttgccgctgcccaatgcca

SEQ ID NO: 1474 - DNA, 28 bp, Homo Sapiens
tgacaacagtttgccgctgcccaatgcc

SEQ ID NO: 1475 - DNA, 28 bp, Homo Sapiens
ctgacaacagtttgccgctgcccaatgc

SEQ ID NO: 1476 - DNA, 28 bp, Homo Sapiens
tctgacaacagtttgccgctgcccaatg

SEQ ID NO: 1477 - DNA, 28 bp, Homo Sapiens
ttctgacaacagtttgccgctgcccaat

SEQ ID NO: 1478 - DNA, 28 bp, Homo Sapiens
gttctgacaacagtttgccgctgcccaa

SEQ ID NO: 1479 - DNA, 28 bp, Homo Sapiens
tgttctgacaacagtttgccgctgccca

SEQ ID NO: 1480 - DNA, 28 bp, Homo Sapiens
atgttctgacaacagtttgccgctgccc

SEQ ID NO: 1481 - DNA, 28 bp, Homo Sapiens
aatgttctgacaacagtttgccgctgcc

SEQ ID NO: 1482 - DNA, 28 bp, Homo Sapiens
caatgttctgacaacagtttgccgctgc

SEQ ID NO: 1483 - DNA, 28 bp, Homo Sapiens
tcaatgttctgacaacagtttgccgctg

SEQ ID NO: 1484 - DNA, 28 bp, Homo Sapiens
ttcaatgttctgacaacagtttgccgct

SEQ ID NO: 1485 - DNA, 28 bp, Homo Sapiens
attcaatgttctgacaacagtttgccgc

SEQ ID NO: 1486 - DNA, 28 bp, Homo Sapiens
cattcaatgttctgacaacagtttgccg

SEQ ID NO: 1487 - DNA, 28 bp, Homo Sapiens
gcattcaatgttctgacaacagtttgcc

SEQ ID NO: 1488 - DNA, 28 bp, Homo Sapiens
tgcattcaatgttctgacaacagtttgc

SEQ ID NO: 1489 - DNA, 28 bp, Homo Sapiens
ttgcattcaatgttctgacaacagtttg

SEQ ID NO: 1490 - DNA, 28 bp, Homo Sapiens
gttgcattcaatgttctgacaacagttt

SEQ ID NO: 1491 - DNA, 28 bp, Homo Sapiens
agttgcattcaatgttctgacaacagtt

SEQ ID NO: 1492 - DNA, 28 bp, Homo Sapiens
cagttgcattcaatgttctgacaacagt

SEQ ID NO: 1493 - DNA, 28 bp, Homo Sapiens
ccagttgcattcaatgttctgacaacag

SEQ ID NO: 1494 - DNA, 28 bp, Homo Sapiens
cccagttgcattcaatgttctgacaaca

SEQ ID NO: 1495 - DNA, 28 bp, Homo Sapiens
ccccagttgcattcaatgttctgacaac

SEQ ID NO: 1496 - DNA, 28 bp, Homo Sapiens
tccccagttgcattcaatgttctgacaa

SEQ ID NO: 1497 - DNA, 28 bp, Homo Sapiens
ttccccagttgcattcaatgttctgaca

SEQ ID NO: 1498 - DNA, 28 bp, Homo Sapiens
cttccccagttgcattcaatgttctgac

SEQ ID NO: 1499 - DNA, 28 bp, Homo Sapiens
tcttccccagttgcattcaatgttctga

SEQ ID NO: 1500 - DNA, 28 bp, Homo Sapiens
ttcttccccagttgcattcaatgttctg

SEQ ID NO: 1501 - DNA, 28 bp, Homo Sapiens
tttcttccccagttgcattcaatgttct

SEQ ID NO: 1502 - DNA, 29 bp, Homo Sapiens
caatgccatcctggagttcctgtaagata

SEQ ID NO: 1503 - DNA, 29 bp, Homo Sapiens
ccaatgccatcctggagttcctgtaagat

SEQ ID NO: 1504 - DNA, 29 bp, Homo Sapiens
cccaatgccatcctggagttcctgtaaga

SEQ ID NO: 1505 - DNA, 29 bp, Homo Sapiens
gcccaatgccatcctggagttcctgtaag

SEQ ID NO: 1506 - DNA, 29 bp, Homo Sapiens
tgcccaatgccatcctggagttcctgtaa

SEQ ID NO: 1507 - DNA, 29 bp, Homo Sapiens
ctgcccaatgccatcctggagttcctgta

SEQ ID NO: 1508 - DNA, 29 bp, Homo Sapiens
gctgcccaatgccatcctggagttcctgt

SEQ ID NO: 1509 - DNA, 29 bp, Homo Sapiens
cgctgcccaatgccatcctggagttcctg

SEQ ID NO: 1510 - DNA, 29 bp, Homo Sapiens
ccgctgcccaatgccatcctggagttcct

SEQ ID NO: 1511 - DNA, 29 bp, Homo Sapiens
gccgctgcccaatgccatcctggagttcc

SEQ ID NO: 1512 - DNA, 29 bp, Homo Sapiens
tgccgctgcccaatgccatcctggagttc

SEQ ID NO: 1513 - DNA, 29 bp, Homo Sapiens
ttgccgctgcccaatgccatcctggagtt

SEQ ID NO: 1514 - DNA, 29 bp, Homo Sapiens
tttgccgctgcccaatgccatcctggagt

SEQ ID NO: 1515 - DNA, 29 bp, Homo Sapiens
gtttgccgctgcccaatgccatcctggag

SEQ ID NO: 1516 - DNA, 29 bp, Homo Sapiens
agtttgccgctgcccaatgccatcctgga

SEQ ID NO: 1517 - DNA, 29 bp, Homo Sapiens
cagtttgccgctgcccaatgccatcctgg

SEQ ID NO: 1518 - DNA, 29 bp, Homo Sapiens
acagtttgccgctgcccaatgccatcctg

SEQ ID NO: 1519 - DNA, 29 bp, Homo Sapiens
aacagtttgccgctgcccaatgccatcct

SEQ ID NO: 1520 - DNA, 29 bp, Homo Sapiens
caacagtttgccgctgcccaatgccatcc

SEQ ID NO: 1521 - DNA, 29 bp, Homo Sapiens
acaacagtttgccgctgcccaatgccatc

SEQ ID NO: 1522 - DNA, 29 bp, Homo Sapiens
gacaacagtttgccgctgcccaatgccat

SEQ ID NO: 1523 - DNA, 29 bp, Homo Sapiens
tgacaacagtttgccgctgcccaatgcca

SEQ ID NO: 1524 - DNA, 29 bp, Homo Sapiens
ctgacaacagtttgccgctgcccaatgcc

SEQ ID NO: 1525 - DNA, 29 bp, Homo Sapiens
tctgacaacagtttgccgctgcccaatgc

SEQ ID NO: 1526 - DNA, 29 bp, Homo Sapiens
ttctgacaacagtttgccgctgcccaatg

SEQ ID NO: 1527 - DNA, 29 bp, Homo Sapiens
gttctgacaacagtttgccgctgcccaat

SEQ ID NO: 1528 - DNA, 29 bp, Homo Sapiens
tgttctgacaacagtttgccgctgcccaa

SEQ ID NO: 1529 - DNA, 29 bp, Homo Sapiens
atgttctgacaacagtttgccgctgccca

SEQ ID NO: 1530 - DNA, 29 bp, Homo Sapiens
aatgttctgacaacagtttgccgctgccc

SEQ ID NO: 1531 - DNA, 29 bp, Homo Sapiens
caatgttctgacaacagtttgccgctgcc

SEQ ID NO: 1532 - DNA, 29 bp, Homo Sapiens
tcaatgttctgacaacagtttgccgctgc

SEQ ID NO: 1533 - DNA, 29 bp, Homo Sapiens
ttcaatgttctgacaacagtttgccgctg

SEQ ID NO: 1534 - DNA, 29 bp, Homo Sapiens
attcaatgttctgacaacagtttgccgct

SEQ ID NO: 1535 - DNA, 29 bp, Homo Sapiens
cattcaatgttctgacaacagtttgccgc

SEQ ID NO: 1536 - DNA, 29 bp, Homo Sapiens
gcattcaatgttctgacaacagtttgccg

SEQ ID NO: 1537 - DNA, 29 bp, Homo Sapiens
tgcattcaatgttctgacaacagtttgcc

SEQ ID NO: 1538 - DNA, 29 bp, Homo Sapiens
ttgcattcaatgttctgacaacagtttgc

SEQ ID NO: 1539 - DNA, 29 bp, Homo Sapiens
gttgcattcaatgttctgacaacagtttg

SEQ ID NO: 1540 - DNA, 29 bp, Homo Sapiens
agttgcattcaatgttctgacaacagttt

SEQ ID NO: 1541 - DNA, 29 bp, Homo Sapiens
cagttgcattcaatgttctgacaacagtt

SEQ ID NO: 1542 - DNA, 29 bp, Homo Sapiens
ccagttgcattcaatgttctgacaacagt

SEQ ID NO: 1543 - DNA, 29 bp, Homo Sapiens
cccagttgcattcaatgttctgacaacag

SEQ ID NO: 1544 - DNA, 29 bp, Homo Sapiens
ccccagttgcattcaatgttctgacaaca

SEQ ID NO: 1545 - DNA, 29 bp, Homo Sapiens
tccccagttgcattcaatgttctgacaac

SEQ ID NO: 1546 - DNA, 29 bp, Homo Sapiens
ttccccagttgcattcaatgttctgacaa

SEQ ID NO: 1547 - DNA, 29 bp, Homo Sapiens
cttccccagttgcattcaatgttctgaca

SEQ ID NO: 1548 - DNA, 29 bp, Homo Sapiens
tcttccccagttgcattcaatgttctgac

SEQ ID NO: 1549 - DNA, 29 bp, Homo Sapiens
ttcttccccagttgcattcaatgttctga

SEQ ID NO: 1550 - DNA, 29 bp, Homo Sapiens
tttcttccccagttgcattcaatgttctg

SEQ ID NO: 1551 - DNA, 29 bp, Homo Sapiens
atttcttccccagttgcattcaatgttct

SEQ ID NO: 1552 - DNA, 30 bp, Homo Sapiens
caatgccatcctggagttcctgtaagatac

SEQ ID NO: 1553 - DNA, 30 bp, Homo Sapiens
ccaatgccatcctggagttcctgtaagata

SEQ ID NO: 1554 - DNA, 30 bp, Homo Sapiens
cccaatgccatcctggagttcctgtaagat

SEQ ID NO: 1555 - DNA, 30 bp, Homo Sapiens
gcccaatgccatcctggagttcctgtaaga

SEQ ID NO: 1556 - DNA, 30 bp, Homo Sapiens
tgcccaatgccatcctggagttcctgtaag

SEQ ID NO: 1557 - DNA, 30 bp, Homo Sapiens
ctgcccaatgccatcctggagttcctgtaa

SEQ ID NO: 1558 - DNA, 30 bp, Homo Sapiens
gctgcccaatgccatcctggagttcctgta

SEQ ID NO: 1559 - DNA, 30 bp, Homo Sapiens
cgctgcccaatgccatcctggagttcctgt

SEQ ID NO: 1560 - DNA, 30 bp, Homo Sapiens
ccgctgcccaatgccatcctggagttcctg

SEQ ID NO: 1561 - DNA, 30 bp, Homo Sapiens
gccgctgcccaatgccatcctggagttcct

SEQ ID NO: 1562 - DNA, 30 bp, Homo Sapiens
tgccgctgcccaatgccatcctggagttcc

SEQ ID NO: 1563 - DNA, 30 bp, Homo Sapiens
ttgccgctgcccaatgccatcctggagttc

SEQ ID NO: 1564 - DNA, 30 bp, Homo Sapiens
tttgccgctgcccaatgccatcctggagtt

SEQ ID NO: 1565 - DNA, 30 bp, Homo Sapiens
gtttgccgctgcccaatgccatcctggagt

SEQ ID NO: 1566 - DNA, 30 bp, Homo Sapiens
agtttgccgctgcccaatgccatcctggag

SEQ ID NO: 1567 - DNA, 30 bp, Homo Sapiens
cagtttgccgctgcccaatgccatcctgga

SEQ ID NO: 1568 - DNA, 30 bp, Homo Sapiens
acagtttgccgctgcccaatgccatcctgg

SEQ ID NO: 1569 - DNA, 30 bp, Homo Sapiens
aacagtttgccgctgcccaatgccatcctg

SEQ ID NO: 1570 - DNA, 30 bp, Homo Sapiens
caacagtttgccgctgcccaatgccatcct

SEQ ID NO: 1571 - DNA, 30 bp, Homo Sapiens
acaacagtttgccgctgcccaatgccatcc

SEQ ID NO: 1572 - DNA, 30 bp, Homo Sapiens
gacaacagtttgccgctgcccaatgccatc

SEQ ID NO: 1573 - DNA, 30 bp, Homo Sapiens
tgacaacagtttgccgctgcccaatgccat

SEQ ID NO: 1574 - DNA, 30 bp, Homo Sapiens
ctgacaacagtttgccgctgcccaatgcca

SEQ ID NO: 1575 - DNA, 30 bp, Homo Sapiens
tctgacaacagtttgccgctgcccaatgcc

SEQ ID NO: 1576 - DNA, 30 bp, Homo Sapiens
ttctgacaacagtttgccgctgcccaatgc

SEQ ID NO: 1577 - DNA, 30 bp, Homo Sapiens
gttctgacaacagtttgccgctgcccaatg

SEQ ID NO: 1578 - DNA, 30 bp, Homo Sapiens
tgttctgacaacagtttgccgctgcccaat

SEQ ID NO: 1579 - DNA, 30 bp, Homo Sapiens
atgttctgacaacagtttgccgctgcccaa

SEQ ID NO: 1580 - DNA, 30 bp, Homo Sapiens
aatgttctgacaacagtttgccgctgccca

SEQ ID NO: 1581 - DNA, 30 bp, Homo Sapiens
caatgttctgacaacagtttgccgctgccc

SEQ ID NO: 1582 - DNA, 30 bp, Homo Sapiens
tcaatgttctgacaacagtttgccgctgcc

SEQ ID NO: 1583 - DNA, 30 bp, Homo Sapiens
ttcaatgttctgacaacagtttgccgctgc

SEQ ID NO: 1584 - DNA, 30 bp, Homo Sapiens
attcaatgttctgacaacagtttgccgctg

SEQ ID NO: 1585 - DNA, 30 bp, Homo Sapiens
cattcaatgttctgacaacagtttgccgct

SEQ ID NO: 1586 - DNA, 30 bp, Homo Sapiens
gcattcaatgttctgacaacagtttgccgc

SEQ ID NO: 1587 - DNA, 30 bp, Homo Sapiens
tgcattcaatgttctgacaacagtttgccg

SEQ ID NO: 1588 - DNA, 30 bp, Homo Sapiens
ttgcattcaatgttctgacaacagtttgcc

SEQ ID NO: 1589 - DNA, 30 bp, Homo Sapiens
gttgcattcaatgttctgacaacagtttgc

SEQ ID NO: 1590 - DNA, 30 bp, Homo Sapiens
agttgcattcaatgttctgacaacagtttg

SEQ ID NO: 1591 - DNA, 30 bp, Homo Sapiens
cagttgcattcaatgttctgacaacagttt

SEQ ID NO: 1592 - DNA, 30 bp, Homo Sapiens
ccagttgcattcaatgttctgacaacagtt

SEQ ID NO: 1593 - DNA, 30 bp, Homo Sapiens
cccagttgcattcaatgttctgacaacagt

SEQ ID NO: 1594 - DNA, 30 bp, Homo Sapiens
ccccagttgcattcaatgttctgacaacag

SEQ ID NO: 1595 - DNA, 30 bp, Homo Sapiens
tccccagttgcattcaatgttctgacaaca

SEQ ID NO: 1596 - DNA, 30 bp, Homo Sapiens
ttccccagttgcattcaatgttctgacaac

SEQ ID NO: 1597 - DNA, 30 bp, Homo Sapiens
cttccccagttgcattcaatgttctgacaa

SEQ ID NO: 1598 - DNA, 30 bp, Homo Sapiens
tcttccccagttgcattcaatgttctgaca

SEQ ID NO: 1599 - DNA, 30 bp, Homo Sapiens
ttcttccccagttgcattcaatgttctgac

SEQ ID NO: 1600 - DNA, 30 bp, Homo Sapiens
tttcttccccagttgcattcaatgttctga

SEQ ID NO: 1601 - DNA, 30 bp, Homo Sapiens
atttcttccccagttgcattcaatgttctg

SEQ ID NO: 1602 - DNA, 30 bp, Homo Sapiens
tatttcttccccagttgcattcaatgttct

SEQ ID NO: 1603 - DNA, 15 bp, Homo Sapiens
aaaaagaggtagggc

SEQ ID NO: 1604 - DNA, 15 bp, Homo Sapiens
aaaagaggtagggcg

SEQ ID NO: 1605 - DNA, 15 bp, Homo Sapiens
aaagaggtagggcga

SEQ ID NO: 1606 - DNA, 15 bp, Homo Sapiens
aagaggtagggcgac

SEQ ID NO: 1607 - DNA, 15 bp, Homo Sapiens
agaggtagggcgaca

SEQ ID NO: 1608 - DNA, 15 bp, Homo Sapiens
gaggtagggcgacag

SEQ ID NO: 1609 - DNA, 15 bp, Homo Sapiens
aggtagggcgacaga

SEQ ID NO: 1610 - DNA, 15 bp, Homo Sapiens
ggtagggcgacagat

SEQ ID NO: 1611 - DNA, 15 bp, Homo Sapiens
gtagggcgacagatc

SEQ ID NO: 1612 - DNA, 15 bp, Homo Sapiens
tagggcgacagatct

SEQ ID NO: 1613 - DNA, 15 bp, Homo Sapiens
agggcgacagatcta

SEQ ID NO: 1614 - DNA, 15 bp, Homo Sapiens
gggcgacagatctaa

SEQ ID NO: 1615 - DNA, 15 bp, Homo Sapiens
ggcgacagatctaat

SEQ ID NO: 1616 - DNA, 15 bp, Homo Sapiens
gcgacagatctaata

SEQ ID NO: 1617 - DNA, 15 bp, Homo Sapiens
cgacagatctaatag

SEQ ID NO: 1618 - DNA, 15 bp, Homo Sapiens
gacagatctaatagg

SEQ ID NO: 1619 - DNA, 15 bp, Homo Sapiens
acagatctaatagga

SEQ ID NO: 1620 - DNA, 15 bp, Homo Sapiens
cagatctaataggaa

SEQ ID NO: 1621 - DNA, 15 bp, Homo Sapiens
agatctaataggaat

SEQ ID NO: 1622 - DNA, 15 bp, Homo Sapiens
gatctaataggaatg

SEQ ID NO: 1623 - DNA, 15 bp, Homo Sapiens
atctaataggaatga

SEQ ID NO: 1624 - DNA, 15 bp, Homo Sapiens
tctaataggaatgaa

SEQ ID NO: 1625 - DNA, 15 bp, Homo Sapiens
ctaataggaatgaaa

SEQ ID NO: 1626 - DNA, 15 bp, Homo Sapiens
taataggaatgaaaa

SEQ ID NO: 1627 - DNA, 15 bp, Homo Sapiens
aataggaatgaaaac

SEQ ID NO: 1628 - DNA, 15 bp, Homo Sapiens
ataggaatgaaaaca

SEQ ID NO: 1629 - DNA, 15 bp, Homo Sapiens
taggaatgaaaacat

SEQ ID NO: 1630 - DNA, 15 bp, Homo Sapiens
aggaatgaaaacatt

SEQ ID NO: 1631 - DNA, 15 bp, Homo Sapiens
ggaatgaaaacattt

SEQ ID NO: 1632 - DNA, 15 bp, Homo Sapiens
gaatgaaaacatttt

SEQ ID NO: 1633 - DNA, 15 bp, Homo Sapiens
aatgaaaacatttta

SEQ ID NO: 1634 - DNA, 15 bp, Homo Sapiens
atgaaaacattttag

SEQ ID NO: 1635 - DNA, 15 bp, Homo Sapiens
tgaaaacattttagc

SEQ ID NO: 1636 - DNA, 15 bp, Homo Sapiens
gaaaacattttagca

SEQ ID NO: 1637 - DNA, 15 bp, Homo Sapiens
aaaacattttagcag

SEQ ID NO: 1638 - DNA, 15 bp, Homo Sapiens
aaacattttagcaga

SEQ ID NO: 1639 - DNA, 15 bp, Homo Sapiens
aacattttagcagac

SEQ ID NO: 1640 - DNA, 15 bp, Homo Sapiens
acattttagcagact

SEQ ID NO: 1641 - DNA, 15 bp, Homo Sapiens
cattttagcagactt

SEQ ID NO: 1642 - DNA, 15 bp, Homo Sapiens
attttagcagacttt

SEQ ID NO: 1643 - DNA, 15 bp, Homo Sapiens
ttttagcagactttt

SEQ ID NO: 1644 - DNA, 15 bp, Homo Sapiens
tttagcagacttttt

SEQ ID NO: 1645 - DNA, 15 bp, Homo Sapiens
ttagcagacttttta

SEQ ID NO: 1646 - DNA, 15 bp, Homo Sapiens
tagcagactttttaa

SEQ ID NO: 1647 - DNA, 15 bp, Homo Sapiens
agcagactttttaag

SEQ ID NO: 1648 - DNA, 15 bp, Homo Sapiens
gcagactttttaagc

SEQ ID NO: 1649 - DNA, 15 bp, Homo Sapiens
cagactttttaagct

SEQ ID NO: 1650 - DNA, 15 bp, Homo Sapiens
agactttttaagctt

SEQ ID NO: 1651 - DNA, 15 bp, Homo Sapiens
gactttttaagcttt

SEQ ID NO: 1652 - DNA, 15 bp, Homo Sapiens
actttttaagctttc

SEQ ID NO: 1653 - DNA, 15 bp, Homo Sapiens
ctttttaagctttct

SEQ ID NO: 1654 - DNA, 15 bp, Homo Sapiens
tttttaagctttctt

SEQ ID NO: 1655 - DNA, 16 bp, Homo Sapiens
aaaaaagaggtagggc

SEQ ID NO: 1656 - DNA, 16 bp, Homo Sapiens
aaaaagaggtagggcg

SEQ ID NO: 1657 - DNA, 16 bp, Homo Sapiens
aaaagaggtagggcga

SEQ ID NO: 1658 - DNA, 16 bp, Homo Sapiens
aaagaggtagggcgac

SEQ ID NO: 1659 - DNA, 16 bp, Homo Sapiens
aagaggtagggcgaca

SEQ ID NO: 1660 - DNA, 16 bp, Homo Sapiens
agaggtagggcgacag

SEQ ID NO: 1661 - DNA, 16 bp, Homo Sapiens
gaggtagggcgacaga

SEQ ID NO: 1662 - DNA, 16 bp, Homo Sapiens
aggtagggcgacagat

SEQ ID NO: 1663 - DNA, 16 bp, Homo Sapiens
ggtagggcgacagatc

SEQ ID NO: 1664 - DNA, 16 bp, Homo Sapiens
gtagggcgacagatct

SEQ ID NO: 1665 - DNA, 16 bp, Homo Sapiens
tagggcgacagatcta

SEQ ID NO: 1666 - DNA, 16 bp, Homo Sapiens
agggcgacagatctaa

SEQ ID NO: 1667 - DNA, 16 bp, Homo Sapiens
gggcgacagatctaat

SEQ ID NO: 1668 - DNA, 16 bp, Homo Sapiens
ggcgacagatctaata

SEQ ID NO: 1669 - DNA, 16 bp, Homo Sapiens
gcgacagatctaatag

SEQ ID NO: 1670 - DNA, 16 bp, Homo Sapiens
cgacagatctaatagg

SEQ ID NO: 1671 - DNA, 16 bp, Homo Sapiens
gacagatctaatagga

SEQ ID NO: 1672 - DNA, 16 bp, Homo Sapiens
acagatctaataggaa

SEQ ID NO: 1673 - DNA, 16 bp, Homo Sapiens
cagatctaataggaat

SEQ ID NO: 1674 - DNA, 16 bp, Homo Sapiens
agatctaataggaatg

SEQ ID NO: 1675 - DNA, 16 bp, Homo Sapiens
gatctaataggaatga

SEQ ID NO: 1676 - DNA, 16 bp, Homo Sapiens
atctaataggaatgaa

SEQ ID NO: 1677 - DNA, 16 bp, Homo Sapiens
tctaataggaatgaaa

SEQ ID NO: 1678 - DNA, 16 bp, Homo Sapiens
ctaataggaatgaaaa

SEQ ID NO: 1679 - DNA, 16 bp, Homo Sapiens
taataggaatgaaaac

SEQ ID NO: 1680 - DNA, 16 bp, Homo Sapiens
aataggaatgaaaaca

SEQ ID NO: 1681 - DNA, 16 bp, Homo Sapiens
ataggaatgaaaacat

SEQ ID NO: 1682 - DNA, 16 bp, Homo Sapiens
taggaatgaaaacatt

SEQ ID NO: 1683 - DNA, 16 bp, Homo Sapiens
aggaatgaaaacattt

SEQ ID NO: 1684 - DNA, 16 bp, Homo Sapiens
ggaatgaaaacatttt

SEQ ID NO: 1685 - DNA, 16 bp, Homo Sapiens
gaatgaaaacatttta

SEQ ID NO: 1686 - DNA, 16 bp, Homo Sapiens
aatgaaaacattttag

SEQ ID NO: 1687 - DNA, 16 bp, Homo Sapiens
atgaaaacattttagc

SEQ ID NO: 1688 - DNA, 16 bp, Homo Sapiens
tgaaaacattttagca

SEQ ID NO: 1689 - DNA, 16 bp, Homo Sapiens
gaaaacattttagcag

SEQ ID NO: 1690 - DNA, 16 bp, Homo Sapiens
aaaacattttagcaga

SEQ ID NO: 1691 - DNA, 16 bp, Homo Sapiens
aaacattttagcagac

SEQ ID NO: 1692 - DNA, 16 bp, Homo Sapiens
aacattttagcagact

SEQ ID NO: 1693 - DNA, 16 bp, Homo Sapiens
acattttagcagactt

SEQ ID NO: 1694 - DNA, 16 bp, Homo Sapiens
cattttagcagacttt

SEQ ID NO: 1695 - DNA, 16 bp, Homo Sapiens
attttagcagactttt

SEQ ID NO: 1696 - DNA, 16 bp, Homo Sapiens
ttttagcagacttttt

SEQ ID NO: 1697 - DNA, 16 bp, Homo Sapiens
tttagcagacttttta

SEQ ID NO: 1698 - DNA, 16 bp, Homo Sapiens
ttagcagactttttaa

SEQ ID NO: 1699 - DNA, 16 bp, Homo Sapiens
tagcagactttttaag

SEQ ID NO: 1700 - DNA, 16 bp, Homo Sapiens
agcagactttttaagc

SEQ ID NO: 1701 - DNA, 16 bp, Homo Sapiens
gcagactttttaagct

SEQ ID NO: 1702 - DNA, 16 bp, Homo Sapiens
cagactttttaagctt

SEQ ID NO: 1703 - DNA, 16 bp, Homo Sapiens
agactttttaagcttt

SEQ ID NO: 1704 - DNA, 16 bp, Homo Sapiens
gactttttaagctttc

SEQ ID NO: 1705 - DNA, 16 bp, Homo Sapiens
actttttaagctttct

SEQ ID NO: 1706 - DNA, 16 bp, Homo Sapiens
ctttttaagctttctt

SEQ ID NO: 1707 - DNA, 16 bp, Homo Sapiens
tttttaagctttcttt

SEQ ID NO: 1708 - DNA, 17 bp, Homo Sapiens
gaaaaaagaggtagggc

SEQ ID NO: 1709 - DNA, 17 bp, Homo Sapiens
aaaaaagaggtagggcg

SEQ ID NO: 1710 - DNA, 17 bp, Homo Sapiens
aaaaagaggtagggcga

SEQ ID NO: 1711 - DNA, 17 bp, Homo Sapiens
aaaagaggtagggcgac

SEQ ID NO: 1712 - DNA, 17 bp, Homo Sapiens
aaagaggtagggcgaca

SEQ ID NO: 1713 - DNA, 17 bp, Homo Sapiens
aagaggtagggcgacag

SEQ ID NO: 1714 - DNA, 17 bp, Homo Sapiens
agaggtagggcgacaga

SEQ ID NO: 1715 - DNA, 17 bp, Homo Sapiens
gaggtagggcgacagat

SEQ ID NO: 1716 - DNA, 17 bp, Homo Sapiens
aggtagggcgacagatc

SEQ ID NO: 1717 - DNA, 17 bp, Homo Sapiens
ggtagggcgacagatct

SEQ ID NO: 1718 - DNA, 17 bp, Homo Sapiens
gtagggcgacagatcta

SEQ ID NO: 1719 - DNA, 17 bp, Homo Sapiens
tagggcgacagatctaa

SEQ ID NO: 1720 - DNA, 17 bp, Homo Sapiens
agggcgacagatctaat

SEQ ID NO: 1721 - DNA, 17 bp, Homo Sapiens
gggcgacagatctaata

SEQ ID NO: 1722 - DNA, 17 bp, Homo Sapiens
ggcgacagatctaatag

SEQ ID NO: 1723 - DNA, 17 bp, Homo Sapiens
gcgacagatctaatagg

SEQ ID NO: 1724 - DNA, 17 bp, Homo Sapiens
cgacagatctaatagga

SEQ ID NO: 1725 - DNA, 17 bp, Homo Sapiens
gacagatctaataggaa

SEQ ID NO: 1726 - DNA, 17 bp, Homo Sapiens
acagatctaataggaat

SEQ ID NO: 1727 - DNA, 17 bp, Homo Sapiens
cagatctaataggaatg

SEQ ID NO: 1728 - DNA, 17 bp, Homo Sapiens
agatctaataggaatga

SEQ ID NO: 1729 - DNA, 17 bp, Homo Sapiens
gatctaataggaatgaa

SEQ ID NO: 1730 - DNA, 17 bp, Homo Sapiens
atctaataggaatgaaa

SEQ ID NO: 1731 - DNA, 17 bp, Homo Sapiens
tctaataggaatgaaaa

SEQ ID NO: 1732 - DNA, 17 bp, Homo Sapiens
ctaataggaatgaaaac

SEQ ID NO: 1733 - DNA, 17 bp, Homo Sapiens
taataggaatgaaaaca

SEQ ID NO: 1734 - DNA, 17 bp, Homo Sapiens
aataggaatgaaaacat

SEQ ID NO: 1735 - DNA, 17 bp, Homo Sapiens
ataggaatgaaaacatt

SEQ ID NO: 1736 - DNA, 17 bp, Homo Sapiens
taggaatgaaaacattt

SEQ ID NO: 1737 - DNA, 17 bp, Homo Sapiens
aggaatgaaaacatttt

SEQ ID NO: 1738 - DNA, 17 bp, Homo Sapiens
ggaatgaaaacatttta

SEQ ID NO: 1739 - DNA, 17 bp, Homo Sapiens
gaatgaaaacattttag

SEQ ID NO: 1740 - DNA, 17 bp, Homo Sapiens
aatgaaaacattttagc

SEQ ID NO: 1741 - DNA, 17 bp, Homo Sapiens
atgaaaacattttagca

SEQ ID NO: 1742 - DNA, 17 bp, Homo Sapiens
tgaaaacattttagcag

SEQ ID NO: 1743 - DNA, 17 bp, Homo Sapiens
gaaaacattttagcaga

SEQ ID NO: 1744 - DNA, 17 bp, Homo Sapiens
aaaacattttagcagac

SEQ ID NO: 1745 - DNA, 17 bp, Homo Sapiens
aaacattttagcagact

SEQ ID NO: 1746 - DNA, 17 bp, Homo Sapiens
aacattttagcagactt

SEQ ID NO: 1747 - DNA, 17 bp, Homo Sapiens
acattttagcagacttt

SEQ ID NO: 1748 - DNA, 17 bp, Homo Sapiens
cattttagcagactttt

SEQ ID NO: 1749 - DNA, 17 bp, Homo Sapiens
attttagcagacttttt

SEQ ID NO: 1750 - DNA, 17 bp, Homo Sapiens
ttttagcagacttttta

SEQ ID NO: 1751 - DNA, 17 bp, Homo Sapiens
tttagcagactttttaa

SEQ ID NO: 1752 - DNA, 17 bp, Homo Sapiens
ttagcagactttttaag

SEQ ID NO: 1753 - DNA, 17 bp, Homo Sapiens
tagcagactttttaagc

SEQ ID NO: 1754 - DNA, 17 bp, Homo Sapiens
agcagactttttaagct

SEQ ID NO: 1755 - DNA, 17 bp, Homo Sapiens
gcagactttttaagctt

SEQ ID NO: 1756 - DNA, 17 bp, Homo Sapiens
cagactttttaagcttt

SEQ ID NO: 1757 - DNA, 17 bp, Homo Sapiens
agactttttaagctttc

SEQ ID NO: 1758 - DNA, 17 bp, Homo Sapiens
gactttttaagctttct

SEQ ID NO: 1759 - DNA, 17 bp, Homo Sapiens
actttttaagctttctt

SEQ ID NO: 1760 - DNA, 17 bp, Homo Sapiens
ctttttaagctttcttt

SEQ ID NO: 1761 - DNA, 17 bp, Homo Sapiens
tttttaagctttcttta

SEQ ID NO: 1762 - DNA, 18 bp, Homo Sapiens
agaaaaaagaggtagggc

SEQ ID NO: 1763 - DNA, 18 bp, Homo Sapiens
gaaaaaagaggtagggcg

SEQ ID NO: 1764 - DNA, 18 bp, Homo Sapiens
aaaaaagaggtagggcga

SEQ ID NO: 1765 - DNA, 18 bp, Homo Sapiens
aaaaagaggtagggcgac

SEQ ID NO: 1766 - DNA, 18 bp, Homo Sapiens
aaaagaggtagggcgaca

SEQ ID NO: 1767 - DNA, 18 bp, Homo Sapiens
aaagaggtagggcgacag

SEQ ID NO: 1768 - DNA, 18 bp, Homo Sapiens
aagaggtagggcgacaga

SEQ ID NO: 1769 - DNA, 18 bp, Homo Sapiens
agaggtagggcgacagat

SEQ ID NO: 1770 - DNA, 18 bp, Homo Sapiens
gaggtagggcgacagatc

SEQ ID NO: 1771 - DNA, 18 bp, Homo Sapiens
aggtagggcgacagatct

SEQ ID NO: 1772 - DNA, 18 bp, Homo Sapiens
ggtagggcgacagatcta

SEQ ID NO: 1773 - DNA, 18 bp, Homo Sapiens
gtagggcgacagatctaa

SEQ ID NO: 1774 - DNA, 18 bp, Homo Sapiens
tagggcgacagatctaat

SEQ ID NO: 1775 - DNA, 18 bp, Homo Sapiens
agggcgacagatctaata

SEQ ID NO: 1776 - DNA, 18 bp, Homo Sapiens
gggcgacagatctaatag

SEQ ID NO: 1777 - DNA, 18 bp, Homo Sapiens
ggcgacagatctaatagg

SEQ ID NO: 1778 - DNA, 18 bp, Homo Sapiens
gcgacagatctaatagga

SEQ ID NO: 1779 - DNA, 18 bp, Homo Sapiens
cgacagatctaataggaa

SEQ ID NO: 1780 - DNA, 18 bp, Homo Sapiens
gacagatctaataggaat

SEQ ID NO: 1781 - DNA, 18 bp, Homo Sapiens
acagatctaataggaatg

SEQ ID NO: 1782 - DNA, 18 bp, Homo Sapiens
cagatctaataggaatga

SEQ ID NO: 1783 - DNA, 18 bp, Homo Sapiens
agatctaataggaatgaa

SEQ ID NO: 1784 - DNA, 18 bp, Homo Sapiens
gatctaataggaatgaaa

SEQ ID NO: 1785 - DNA, 18 bp, Homo Sapiens
atctaataggaatgaaaa

SEQ ID NO: 1786 - DNA, 18 bp, Homo Sapiens
tctaataggaatgaaaac

SEQ ID NO: 1787 - DNA, 18 bp, Homo Sapiens
ctaataggaatgaaaaca

SEQ ID NO: 1788 - DNA, 18 bp, Homo Sapiens
taataggaatgaaaacat

SEQ ID NO: 1789 - DNA, 18 bp, Homo Sapiens
aataggaatgaaaacatt

SEQ ID NO: 1790 - DNA, 18 bp, Homo Sapiens
ataggaatgaaaacattt

SEQ ID NO: 1791 - DNA, 18 bp, Homo Sapiens
taggaatgaaaacatttt

SEQ ID NO: 1792 - DNA, 18 bp, Homo Sapiens
aggaatgaaaacatttta

SEQ ID NO: 1793 - DNA, 18 bp, Homo Sapiens
ggaatgaaaacattttag

SEQ ID NO: 1794 - DNA, 18 bp, Homo Sapiens
gaatgaaaacattttagc

SEQ ID NO: 1795 - DNA, 18 bp, Homo Sapiens
aatgaaaacattttagca

SEQ ID NO: 1796 - DNA, 18 bp, Homo Sapiens
atgaaaacattttagcag

SEQ ID NO: 1797 - DNA, 18 bp, Homo Sapiens
tgaaaacattttagcaga

SEQ ID NO: 1798 - DNA, 18 bp, Homo Sapiens
gaaaacattttagcagac

SEQ ID NO: 1799 - DNA, 18 bp, Homo Sapiens
aaaacattttagcagact

SEQ ID NO: 1800 - DNA, 18 bp, Homo Sapiens
aaacattttagcagactt

SEQ ID NO: 1801 - DNA, 18 bp, Homo Sapiens
aacattttagcagacttt

SEQ ID NO: 1802 - DNA, 18 bp, Homo Sapiens
acattttagcagactttt

SEQ ID NO: 1803 - DNA, 18 bp, Homo Sapiens
cattttagcagacttttt

SEQ ID NO: 1804 - DNA, 18 bp, Homo Sapiens
attttagcagacttttta

SEQ ID NO: 1805 - DNA, 18 bp, Homo Sapiens
ttttagcagactttttaa

SEQ ID NO: 1806 - DNA, 18 bp, Homo Sapiens
tttagcagactttttaag

SEQ ID NO: 1807 - DNA, 18 bp, Homo Sapiens
ttagcagactttttaagc

SEQ ID NO: 1808 - DNA, 18 bp, Homo Sapiens
tagcagactttttaagct

SEQ ID NO: 1809 - DNA, 18 bp, Homo Sapiens
agcagactttttaagctt

SEQ ID NO: 1810 - DNA, 18 bp, Homo Sapiens
gcagactttttaagcttt

SEQ ID NO: 1811 - DNA, 18 bp, Homo Sapiens
cagactttttaagctttc

SEQ ID NO: 1812 - DNA, 18 bp, Homo Sapiens
agactttttaagctttct

SEQ ID NO: 1813 - DNA, 18 bp, Homo Sapiens
gactttttaagctttctt

SEQ ID NO: 1814 - DNA, 18 bp, Homo Sapiens
actttttaagctttcttt

SEQ ID NO: 1815 - DNA, 18 bp, Homo Sapiens
ctttttaagctttcttta

SEQ ID NO: 1816 - DNA, 18 bp, Homo Sapiens
tttttaagctttctttag

SEQ ID NO: 1817 - DNA, 19 bp, Homo Sapiens
cagaaaaaagaggtagggc

SEQ ID NO: 1818 - DNA, 19 bp, Homo Sapiens
agaaaaaagaggtagggcg

SEQ ID NO: 1819 - DNA, 19 bp, Homo Sapiens
gaaaaaagaggtagggcga

SEQ ID NO: 1820 - DNA, 19 bp, Homo Sapiens
aaaaaagaggtagggcgac

SEQ ID NO: 1821 - DNA, 19 bp, Homo Sapiens
aaaaagaggtagggcgaca

SEQ ID NO: 1822 - DNA, 19 bp, Homo Sapiens
aaaagaggtagggcgacag

SEQ ID NO: 1823 - DNA, 19 bp, Homo Sapiens
aaagaggtagggcgacaga

SEQ ID NO: 1824 - DNA, 19 bp, Homo Sapiens
aagaggtagggcgacagat

SEQ ID NO: 1825 - DNA, 19 bp, Homo Sapiens
agaggtagggcgacagatc

SEQ ID NO: 1826 - DNA, 19 bp, Homo Sapiens
gaggtagggcgacagatct

SEQ ID NO: 1827 - DNA, 19 bp, Homo Sapiens
aggtagggcgacagatcta

SEQ ID NO: 1828 - DNA, 19 bp, Homo Sapiens
ggtagggcgacagatctaa

SEQ ID NO: 1829 - DNA, 19 bp, Homo Sapiens
gtagggcgacagatctaat

SEQ ID NO: 1830 - DNA, 19 bp, Homo Sapiens
tagggcgacagatctaata

SEQ ID NO: 1831 - DNA, 19 bp, Homo Sapiens
agggcgacagatctaatag

SEQ ID NO: 1832 - DNA, 19 bp, Homo Sapiens
gggcgacagatctaatagg

SEQ ID NO: 1833 - DNA, 19 bp, Homo Sapiens
ggcgacagatctaatagga

SEQ ID NO: 1834 - DNA, 19 bp, Homo Sapiens
gcgacagatctaataggaa

SEQ ID NO: 1835 - DNA, 19 bp, Homo Sapiens
cgacagatctaataggaat

SEQ ID NO: 1836 - DNA, 19 bp, Homo Sapiens
gacagatctaataggaatg

SEQ ID NO: 1837 - DNA, 19 bp, Homo Sapiens
acagatctaataggaatga

SEQ ID NO: 1838 - DNA, 19 bp, Homo Sapiens
cagatctaataggaatgaa

SEQ ID NO: 1839 - DNA, 19 bp, Homo Sapiens
agatctaataggaatgaaa

SEQ ID NO: 1840 - DNA, 19 bp, Homo Sapiens
gatctaataggaatgaaaa

SEQ ID NO: 1841 - DNA, 19 bp, Homo Sapiens
atctaataggaatgaaaac

SEQ ID NO: 1842 - DNA, 19 bp, Homo Sapiens
tctaataggaatgaaaaca

SEQ ID NO: 1843 - DNA, 19 bp, Homo Sapiens
ctaataggaatgaaaacat

SEQ ID NO: 1844 - DNA, 19 bp, Homo Sapiens
taataggaatgaaaacatt

SEQ ID NO: 1845 - DNA, 19 bp, Homo Sapiens
aataggaatgaaaacattt

SEQ ID NO: 1846 - DNA, 19 bp, Homo Sapiens
ataggaatgaaaacatttt

SEQ ID NO: 1847 - DNA, 19 bp, Homo Sapiens
taggaatgaaaacatttta

SEQ ID NO: 1848 - DNA, 19 bp, Homo Sapiens
aggaatgaaaacattttag

SEQ ID NO: 1849 - DNA, 19 bp, Homo Sapiens
ggaatgaaaacattttagc

SEQ ID NO: 1850 - DNA, 19 bp, Homo Sapiens
gaatgaaaacattttagca

SEQ ID NO: 1851 - DNA, 19 bp, Homo Sapiens
aatgaaaacattttagcag

SEQ ID NO: 1852 - DNA, 19 bp, Homo Sapiens
atgaaaacattttagcaga

SEQ ID NO: 1853 - DNA, 19 bp, Homo Sapiens
tgaaaacattttagcagac

SEQ ID NO: 1854 - DNA, 19 bp, Homo Sapiens
gaaaacattttagcagact

SEQ ID NO: 1855 - DNA, 19 bp, Homo Sapiens
aaaacattttagcagactt

SEQ ID NO: 1856 - DNA, 19 bp, Homo Sapiens
aaacattttagcagacttt

SEQ ID NO: 1857 - DNA, 19 bp, Homo Sapiens
aacattttagcagactttt

SEQ ID NO: 1858 - DNA, 19 bp, Homo Sapiens
acattttagcagacttttt

SEQ ID NO: 1859 - DNA, 19 bp, Homo Sapiens
cattttagcagacttttta

SEQ ID NO: 1860 - DNA, 19 bp, Homo Sapiens
attttagcagactttttaa

SEQ ID NO: 1861 - DNA, 19 bp, Homo Sapiens
ttttagcagactttttaag

SEQ ID NO: 1862 - DNA, 19 bp, Homo Sapiens
tttagcagactttttaagc

SEQ ID NO: 1863 - DNA, 19 bp, Homo Sapiens
ttagcagactttttaagct

SEQ ID NO: 1864 - DNA, 19 bp, Homo Sapiens
tagcagactttttaagctt

SEQ ID NO: 1865 - DNA, 19 bp, Homo Sapiens
agcagactttttaagcttt

SEQ ID NO: 1866 - DNA, 19 bp, Homo Sapiens
gcagactttttaagctttc

SEQ ID NO: 1867 - DNA, 19 bp, Homo Sapiens
cagactttttaagctttct

SEQ ID NO: 1868 - DNA, 19 bp, Homo Sapiens
agactttttaagctttctt

SEQ ID NO: 1869 - DNA, 19 bp, Homo Sapiens
gactttttaagctttcttt

SEQ ID NO: 1870 - DNA, 19 bp, Homo Sapiens
actttttaagctttcttta

SEQ ID NO: 1871 - DNA, 19 bp, Homo Sapiens
ctttttaagctttctttag

SEQ ID NO: 1872 - DNA, 19 bp, Homo Sapiens
tttttaagctttctttaga

SEQ ID NO: 1873 - DNA, 20 bp, Homo Sapiens
acagaaaaaagaggtagggc

SEQ ID NO: 1874 - DNA, 20 bp, Homo Sapiens
cagaaaaaagaggtagggcg

SEQ ID NO: 1875 - DNA, 20 bp, Homo Sapiens
agaaaaaagaggtagggcga

SEQ ID NO: 1876 - DNA, 20 bp, Homo Sapiens
gaaaaaagaggtagggcgac

SEQ ID NO: 1877 - DNA, 20 bp, Homo Sapiens
aaaaaagaggtagggcgaca

SEQ ID NO: 1878 - DNA, 20 bp, Homo Sapiens
aaaaagaggtagggcgacag

SEQ ID NO: 1879 - DNA, 20 bp, Homo Sapiens
aaaagaggtagggcgacaga

SEQ ID NO: 1880 - DNA, 20 bp, Homo Sapiens
aaagaggtagggcgacagat

SEQ ID NO: 1881 - DNA, 20 bp, Homo Sapiens
aagaggtagggcgacagatc

SEQ ID NO: 1882 - DNA, 20 bp, Homo Sapiens
agaggtagggcgacagatct

SEQ ID NO: 1883 - DNA, 20 bp, Homo Sapiens
gaggtagggcgacagatcta

SEQ ID NO: 1884 - DNA, 20 bp, Homo Sapiens
aggtagggcgacagatctaa

SEQ ID NO: 1885 - DNA, 20 bp, Homo Sapiens
ggtagggcgacagatctaat

SEQ ID NO: 1886 - DNA, 20 bp, Homo Sapiens
gtagggcgacagatctaata

SEQ ID NO: 1887 - DNA, 20 bp, Homo Sapiens
tagggcgacagatctaatag

SEQ ID NO: 1888 - DNA, 20 bp, Homo Sapiens
agggcgacagatctaatagg

SEQ ID NO: 1889 - DNA, 20 bp, Homo Sapiens
gggcgacagatctaatagga

SEQ ID NO: 1890 - DNA, 20 bp, Homo Sapiens
ggcgacagatctaataggaa

SEQ ID NO: 1891 - DNA, 20 bp, Homo Sapiens
gcgacagatctaataggaat

SEQ ID NO: 1892 - DNA, 20 bp, Homo Sapiens
cgacagatctaataggaatg

SEQ ID NO: 1893 - DNA, 20 bp, Homo Sapiens
gacagatctaataggaatga

SEQ ID NO: 1894 - DNA, 20 bp, Homo Sapiens
acagatctaataggaatgaa

SEQ ID NO: 1895 - DNA, 20 bp, Homo Sapiens
cagatctaataggaatgaaa

SEQ ID NO: 1896 - DNA, 20 bp, Homo Sapiens
agatctaataggaatgaaaa

SEQ ID NO: 1897 - DNA, 20 bp, Homo Sapiens
gatctaataggaatgaaaac

SEQ ID NO: 1898 - DNA, 20 bp, Homo Sapiens
atctaataggaatgaaaaca

SEQ ID NO: 1899 - DNA, 20 bp, Homo Sapiens
tctaataggaatgaaaacat

SEQ ID NO: 1900 - DNA, 20 bp, Homo Sapiens
ctaataggaatgaaaacatt

SEQ ID NO: 1901 - DNA, 20 bp, Homo Sapiens
taataggaatgaaaacattt

SEQ ID NO: 1902 - DNA, 20 bp, Homo Sapiens
aataggaatgaaaacatttt

SEQ ID NO: 1903 - DNA, 20 bp, Homo Sapiens
ataggaatgaaaacatttta

SEQ ID NO: 1904 - DNA, 20 bp, Homo Sapiens
taggaatgaaaacattttag

SEQ ID NO: 1905 - DNA, 20 bp, Homo Sapiens
aggaatgaaaacattttagc

SEQ ID NO: 1906 - DNA, 20 bp, Homo Sapiens
ggaatgaaaacattttagca

SEQ ID NO: 1907 - DNA, 20 bp, Homo Sapiens
gaatgaaaacattttagcag

SEQ ID NO: 1908 - DNA, 20 bp, Homo Sapiens
aatgaaaacattttagcaga

SEQ ID NO: 1909 - DNA, 20 bp, Homo Sapiens
atgaaaacattttagcagac

SEQ ID NO: 1910 - DNA, 20 bp, Homo Sapiens
tgaaaacattttagcagact

SEQ ID NO: 1911 - DNA, 20 bp, Homo Sapiens
gaaaacattttagcagactt

SEQ ID NO: 1912 - DNA, 20 bp, Homo Sapiens
aaaacattttagcagacttt

SEQ ID NO: 1913 - DNA, 20 bp, Homo Sapiens
aaacattttagcagactttt

SEQ ID NO: 1914 - DNA, 20 bp, Homo Sapiens
aacattttagcagacttttt

SEQ ID NO: 1915 - DNA, 20 bp, Homo Sapiens
acattttagcagacttttta

SEQ ID NO: 1916 - DNA, 20 bp, Homo Sapiens
cattttagcagactttttaa

SEQ ID NO: 1917 - DNA, 20 bp, Homo Sapiens
attttagcagactttttaag

SEQ ID NO: 1918 - DNA, 20 bp, Homo Sapiens
ttttagcagactttttaagc

SEQ ID NO: 1919 - DNA, 20 bp, Homo Sapiens
tttagcagactttttaagct

SEQ ID NO: 1920 - DNA, 20 bp, Homo Sapiens
ttagcagactttttaagctt

SEQ ID NO: 1921 - DNA, 20 bp, Homo Sapiens
tagcagactttttaagcttt

SEQ ID NO: 1922 - DNA, 20 bp, Homo Sapiens
agcagactttttaagctttc

SEQ ID NO: 1923 - DNA, 20 bp, Homo Sapiens
gcagactttttaagctttct

SEQ ID NO: 1924 - DNA, 20 bp, Homo Sapiens
cagactttttaagctttctt

SEQ ID NO: 1925 - DNA, 20 bp, Homo Sapiens
agactttttaagctttcttt

SEQ ID NO: 1926 - DNA, 20 bp, Homo Sapiens
gactttttaagctttcttta

SEQ ID NO: 1927 - DNA, 20 bp, Homo Sapiens
actttttaagctttctttag

SEQ ID NO: 1928 - DNA, 20 bp, Homo Sapiens
ctttttaagctttctttaga

SEQ ID NO: 1929 - DNA, 20 bp, Homo Sapiens
tttttaagctttctttagaa

SEQ ID NO: 1930 - DNA, 21 bp, Homo Sapiens
gacagaaaaaagaggtagggc

SEQ ID NO: 1931 - DNA, 21 bp, Homo Sapiens
acagaaaaaagaggtagggcg

SEQ ID NO: 1932 - DNA, 21 bp, Homo Sapiens
cagaaaaaagaggtagggcga

SEQ ID NO: 1933 - DNA, 21 bp, Homo Sapiens
agaaaaaagaggtagggcgac

SEQ ID NO: 1934 - DNA, 21 bp, Homo Sapiens
gaaaaaagaggtagggcgaca

SEQ ID NO: 1935 - DNA, 21 bp, Homo Sapiens
aaaaaagaggtagggcgacag

SEQ ID NO: 1936 - DNA, 21 bp, Homo Sapiens
aaaaagaggtagggcgacaga

SEQ ID NO: 1937 - DNA, 21 bp, Homo Sapiens
aaaagaggtagggcgacagat

SEQ ID NO: 1938 - DNA, 21 bp, Homo Sapiens
aaagaggtagggcgacagatc

SEQ ID NO: 1939 - DNA, 21 bp, Homo Sapiens
aagaggtagggcgacagatct

SEQ ID NO: 1940 - DNA, 21 bp, Homo Sapiens
agaggtagggcgacagatcta

SEQ ID NO: 1941 - DNA, 21 bp, Homo Sapiens
gaggtagggcgacagatctaa

SEQ ID NO: 1942 - DNA, 21 bp, Homo Sapiens
aggtagggcgacagatctaat

SEQ ID NO: 1943 - DNA, 21 bp, Homo Sapiens
ggtagggcgacagatctaata

SEQ ID NO: 1944 - DNA, 21 bp, Homo Sapiens
gtagggcgacagatctaatag

SEQ ID NO: 1945 - DNA, 21 bp, Homo Sapiens
tagggcgacagatctaatagg

SEQ ID NO: 1946 - DNA, 21 bp, Homo Sapiens
agggcgacagatctaatagga

SEQ ID NO: 1947 - DNA, 21 bp, Homo Sapiens
gggcgacagatctaataggaa

SEQ ID NO: 1948 - DNA, 21 bp, Homo Sapiens
ggcgacagatctaataggaat

SEQ ID NO: 1949 - DNA, 21 bp, Homo Sapiens
gcgacagatctaataggaatg

SEQ ID NO: 1950 - DNA, 21 bp, Homo Sapiens
cgacagatctaataggaatga

SEQ ID NO: 1951 - DNA, 21 bp, Homo Sapiens
gacagatctaataggaatgaa

SEQ ID NO: 1952 - DNA, 21 bp, Homo Sapiens
acagatctaataggaatgaaa

SEQ ID NO: 1953 - DNA, 21 bp, Homo Sapiens
cagatctaataggaatgaaaa

SEQ ID NO: 1954 - DNA, 21 bp, Homo Sapiens
agatctaataggaatgaaaac

SEQ ID NO: 1955 - DNA, 21 bp, Homo Sapiens
gatctaataggaatgaaaaca

SEQ ID NO: 1956 - DNA, 21 bp, Homo Sapiens
atctaataggaatgaaaacat

SEQ ID NO: 1957 - DNA, 21 bp, Homo Sapiens
tctaataggaatgaaaacatt

SEQ ID NO: 1958 - DNA, 21 bp, Homo Sapiens
ctaataggaatgaaaacattt

SEQ ID NO: 1959 - DNA, 21 bp, Homo Sapiens
taataggaatgaaaacatttt

SEQ ID NO: 1960 - DNA, 21 bp, Homo Sapiens
aataggaatgaaaacatttta

SEQ ID NO: 1961 - DNA, 21 bp, Homo Sapiens
ataggaatgaaaacattttag

SEQ ID NO: 1962 - DNA, 21 bp, Homo Sapiens
taggaatgaaaacattttagc

SEQ ID NO: 1963 - DNA, 21 bp, Homo Sapiens
aggaatgaaaacattttagca

SEQ ID NO: 1964 - DNA, 21 bp, Homo Sapiens
ggaatgaaaacattttagcag

SEQ ID NO: 1965 - DNA, 21 bp, Homo Sapiens
gaatgaaaacattttagcaga

SEQ ID NO: 1966 - DNA, 21 bp, Homo Sapiens
aatgaaaacattttagcagac

SEQ ID NO: 1967 - DNA, 21 bp, Homo Sapiens
atgaaaacattttagcagact

SEQ ID NO: 1968 - DNA, 21 bp, Homo Sapiens
tgaaaacattttagcagactt

SEQ ID NO: 1969 - DNA, 21 bp, Homo Sapiens
gaaaacattttagcagacttt

SEQ ID NO: 1970 - DNA, 21 bp, Homo Sapiens
aaaacattttagcagactttt

SEQ ID NO: 1971 - DNA, 21 bp, Homo Sapiens
aaacattttagcagacttttt

SEQ ID NO: 1972 - DNA, 21 bp, Homo Sapiens
aacattttagcagacttttta

SEQ ID NO: 1973 - DNA, 21 bp, Homo Sapiens
acattttagcagactttttaa

SEQ ID NO: 1974 - DNA, 21 bp, Homo Sapiens
cattttagcagactttttaag

SEQ ID NO: 1975 - DNA, 21 bp, Homo Sapiens
attttagcagactttttaagc

SEQ ID NO: 1976 - DNA, 21 bp, Homo Sapiens
ttttagcagactttttaagct

SEQ ID NO: 1977 - DNA, 21 bp, Homo Sapiens
tttagcagactttttaagctt

SEQ ID NO: 1978 - DNA, 21 bp, Homo Sapiens
ttagcagactttttaagcttt

SEQ ID NO: 1979 - DNA, 21 bp, Homo Sapiens
tagcagactttttaagctttc

SEQ ID NO: 1980 - DNA, 21 bp, Homo Sapiens
agcagactttttaagctttct

SEQ ID NO: 1981 - DNA, 21 bp, Homo Sapiens
gcagactttttaagctttctt

SEQ ID NO: 1982 - DNA, 21 bp, Homo Sapiens
cagactttttaagctttcttt

SEQ ID NO: 1983 - DNA, 21 bp, Homo Sapiens
agactttttaagctttcttta

SEQ ID NO: 1984 - DNA, 21 bp, Homo Sapiens
gactttttaagctttctttag

SEQ ID NO: 1985 - DNA, 21 bp, Homo Sapiens
actttttaagctttctttaga

SEQ ID NO: 1986 - DNA, 21 bp, Homo Sapiens
ctttttaagctttctttagaa

SEQ ID NO: 1987 - DNA, 21 bp, Homo Sapiens
tttttaagctttctttagaag

SEQ ID NO: 1988 - DNA, 22 bp, Homo Sapiens
agacagaaaaaagaggtagggc

SEQ ID NO: 1989 - DNA, 22 bp, Homo Sapiens
gacagaaaaaagaggtagggcg

SEQ ID NO: 1990 - DNA, 22 bp, Homo Sapiens
acagaaaaaagaggtagggcga

SEQ ID NO: 1991 - DNA, 22 bp, Homo Sapiens
cagaaaaaagaggtagggcgac

SEQ ID NO: 1992 - DNA, 22 bp, Homo Sapiens
agaaaaaagaggtagggcgaca

SEQ ID NO: 1993 - DNA, 22 bp, Homo Sapiens
gaaaaaagaggtagggcgacag

SEQ ID NO: 1994 - DNA, 22 bp, Homo Sapiens
aaaaaagaggtagggcgacaga

SEQ ID NO: 1995 - DNA, 22 bp, Homo Sapiens
aaaaagaggtagggcgacagat

SEQ ID NO: 1996 - DNA, 22 bp, Homo Sapiens
aaaagaggtagggcgacagatc

SEQ ID NO: 1997 - DNA, 22 bp, Homo Sapiens
aaagaggtagggcgacagatct

SEQ ID NO: 1998 - DNA, 22 bp, Homo Sapiens
aagaggtagggcgacagatcta

SEQ ID NO: 1999 - DNA, 22 bp, Homo Sapiens
agaggtagggcgacagatctaa

SEQ ID NO: 2000 - DNA, 22 bp, Homo Sapiens
gaggtagggcgacagatctaat

SEQ ID NO: 2001 - DNA, 22 bp, Homo Sapiens
aggtagggcgacagatctaata

SEQ ID NO: 2002 - DNA, 22 bp, Homo Sapiens
ggtagggcgacagatctaatag

SEQ ID NO: 2003 - DNA, 22 bp, Homo Sapiens
gtagggcgacagatctaatagg

SEQ ID NO: 2004 - DNA, 22 bp, Homo Sapiens
tagggcgacagatctaatagga

SEQ ID NO: 2005 - DNA, 22 bp, Homo Sapiens
agggcgacagatctaataggaa

SEQ ID NO: 2006 - DNA, 22 bp, Homo Sapiens
gggcgacagatctaataggaat

SEQ ID NO: 2007 - DNA, 22 bp, Homo Sapiens
ggcgacagatctaataggaatg

SEQ ID NO: 2008 - DNA, 22 bp, Homo Sapiens
gcgacagatctaataggaatga

SEQ ID NO: 2009 - DNA, 22 bp, Homo Sapiens
cgacagatctaataggaatgaa

SEQ ID NO: 2010 - DNA, 22 bp, Homo Sapiens
gacagatctaataggaatgaaa

SEQ ID NO: 2011 - DNA, 22 bp, Homo Sapiens
acagatctaataggaatgaaaa

SEQ ID NO: 2012 - DNA, 22 bp, Homo Sapiens
cagatctaataggaatgaaaac

SEQ ID NO: 2013 - DNA, 22 bp, Homo Sapiens
agatctaataggaatgaaaaca

SEQ ID NO: 2014 - DNA, 22 bp, Homo Sapiens
gatctaataggaatgaaaacat

SEQ ID NO: 2015 - DNA, 22 bp, Homo Sapiens
atctaataggaatgaaaacatt

SEQ ID NO: 2016 - DNA, 22 bp, Homo Sapiens
tctaataggaatgaaaacattt

SEQ ID NO: 2017 - DNA, 22 bp, Homo Sapiens
ctaataggaatgaaaacatttt

SEQ ID NO: 2018 - DNA, 22 bp, Homo Sapiens
taataggaatgaaaacatttta

SEQ ID NO: 2019 - DNA, 22 bp, Homo Sapiens
aataggaatgaaaacattttag

SEQ ID NO: 2020 - DNA, 22 bp, Homo Sapiens
ataggaatgaaaacattttagc

SEQ ID NO: 2021 - DNA, 22 bp, Homo Sapiens
taggaatgaaaacattttagca

SEQ ID NO: 2022 - DNA, 22 bp, Homo Sapiens
aggaatgaaaacattttagcag

SEQ ID NO: 2023 - DNA, 22 bp, Homo Sapiens
ggaatgaaaacattttagcaga

SEQ ID NO: 2024 - DNA, 22 bp, Homo Sapiens
gaatgaaaacattttagcagac

SEQ ID NO: 2025 - DNA, 22 bp, Homo Sapiens
aatgaaaacattttagcagact

SEQ ID NO: 2026 - DNA, 22 bp, Homo Sapiens
atgaaaacattttagcagactt

SEQ ID NO: 2027 - DNA, 22 bp, Homo Sapiens
tgaaaacattttagcagacttt

SEQ ID NO: 2028 - DNA, 22 bp, Homo Sapiens
gaaaacattttagcagactttt

SEQ ID NO: 2029 - DNA, 22 bp, Homo Sapiens
aaaacattttagcagacttttt

SEQ ID NO: 2030 - DNA, 22 bp, Homo Sapiens
aaacattttagcagacttttta

SEQ ID NO: 2031 - DNA, 22 bp, Homo Sapiens
aacattttagcagactttttaa

SEQ ID NO: 2032 - DNA, 22 bp, Homo Sapiens
acattttagcagactttttaag

SEQ ID NO: 2033 - DNA, 22 bp, Homo Sapiens
cattttagcagactttttaagc

SEQ ID NO: 2034 - DNA, 22 bp, Homo Sapiens
attttagcagactttttaagct

SEQ ID NO: 2035 - DNA, 22 bp, Homo Sapiens
ttttagcagactttttaagctt

SEQ ID NO: 2036 - DNA, 22 bp, Homo Sapiens
tttagcagactttttaagcttt

SEQ ID NO: 2037 - DNA, 22 bp, Homo Sapiens
ttagcagactttttaagctttc

SEQ ID NO: 2038 - DNA, 22 bp, Homo Sapiens
tagcagactttttaagctttct

SEQ ID NO: 2039 - DNA, 22 bp, Homo Sapiens
agcagactttttaagctttctt

SEQ ID NO: 2040 - DNA, 22 bp, Homo Sapiens
gcagactttttaagctttcttt

SEQ ID NO: 2041 - DNA, 22 bp, Homo Sapiens
cagactttttaagctttcttta

SEQ ID NO: 2042 - DNA, 22 bp, Homo Sapiens
agactttttaagctttctttag

SEQ ID NO: 2043 - DNA, 22 bp, Homo Sapiens
gactttttaagctttctttaga

SEQ ID NO: 2044 - DNA, 22 bp, Homo Sapiens
actttttaagctttctttagaa

SEQ ID NO: 2045 - DNA, 22 bp, Homo Sapiens
ctttttaagctttctttagaag

SEQ ID NO: 2046 - DNA, 22 bp, Homo Sapiens
tttttaagctttctttagaaga

SEQ ID NO: 2047 - DNA, 23 bp, Homo Sapiens
cagacagaaaaaagaggtagggc

SEQ ID NO: 2048 - DNA, 23 bp, Homo Sapiens
agacagaaaaaagaggtagggcg

SEQ ID NO: 2049 - DNA, 23 bp, Homo Sapiens
gacagaaaaaagaggtagggcga

SEQ ID NO: 2050 - DNA, 23 bp, Homo Sapiens
acagaaaaaagaggtagggcgac

SEQ ID NO: 2051 - DNA, 23 bp, Homo Sapiens
cagaaaaaagaggtagggcgaca

SEQ ID NO: 2052 - DNA, 23 bp, Homo Sapiens
agaaaaaagaggtagggcgacag

SEQ ID NO: 2053 - DNA, 23 bp, Homo Sapiens
gaaaaaagaggtagggcgacaga

SEQ ID NO: 2054 - DNA, 23 bp, Homo Sapiens
aaaaaagaggtagggcgacagat

SEQ ID NO: 2055 - DNA, 23 bp, Homo Sapiens
aaaaagaggtagggcgacagatc

SEQ ID NO: 2056 - DNA, 23 bp, Homo Sapiens
aaaagaggtagggcgacagatct

SEQ ID NO: 2057 - DNA, 23 bp, Homo Sapiens
aaagaggtagggcgacagatcta

SEQ ID NO: 2058 - DNA, 23 bp, Homo Sapiens
aagaggtagggcgacagatctaa

SEQ ID NO: 2059 - DNA, 23 bp, Homo Sapiens
agaggtagggcgacagatctaat

SEQ ID NO: 2060 - DNA, 23 bp, Homo Sapiens
gaggtagggcgacagatctaata

SEQ ID NO: 2061 - DNA, 23 bp, Homo Sapiens
aggtagggcgacagatctaatag

SEQ ID NO: 2062 - DNA, 23 bp, Homo Sapiens
ggtagggcgacagatctaatagg

SEQ ID NO: 2063 - DNA, 23 bp, Homo Sapiens
gtagggcgacagatctaatagga

SEQ ID NO: 2064 - DNA, 23 bp, Homo Sapiens
tagggcgacagatctaataggaa

SEQ ID NO: 2065 - DNA, 23 bp, Homo Sapiens
agggcgacagatctaataggaat

SEQ ID NO: 2066 - DNA, 23 bp, Homo Sapiens
gggcgacagatctaataggaatg

SEQ ID NO: 2067 - DNA, 23 bp, Homo Sapiens
ggcgacagatctaataggaatga

SEQ ID NO: 2068 - DNA, 23 bp, Homo Sapiens
gcgacagatctaataggaatgaa

SEQ ID NO: 2069 - DNA, 23 bp, Homo Sapiens
cgacagatctaataggaatgaaa

SEQ ID NO: 2070 - DNA, 23 bp, Homo Sapiens
gacagatctaataggaatgaaaa

SEQ ID NO: 2071 - DNA, 23 bp, Homo Sapiens
acagatctaataggaatgaaaac

SEQ ID NO: 2072 - DNA, 23 bp, Homo Sapiens
cagatctaataggaatgaaaaca

SEQ ID NO: 2073 - DNA, 23 bp, Homo Sapiens
agatctaataggaatgaaaacat

SEQ ID NO: 2074 - DNA, 23 bp, Homo Sapiens
gatctaataggaatgaaaacatt

SEQ ID NO: 2075 - DNA, 23 bp, Homo Sapiens
atctaataggaatgaaaacattt

SEQ ID NO: 2076 - DNA, 23 bp, Homo Sapiens
tctaataggaatgaaaacatttt

SEQ ID NO: 2077 - DNA, 23 bp, Homo Sapiens
ctaataggaatgaaaacatttta

SEQ ID NO: 2078 - DNA, 23 bp, Homo Sapiens
taataggaatgaaaacattttag

SEQ ID NO: 2079 - DNA, 23 bp, Homo Sapiens
aataggaatgaaaacattttagc

SEQ ID NO: 2080 - DNA, 23 bp, Homo Sapiens
ataggaatgaaaacattttagca

SEQ ID NO: 2081 - DNA, 23 bp, Homo Sapiens
taggaatgaaaacattttagcag

SEQ ID NO: 2082 - DNA, 23 bp, Homo Sapiens
aggaatgaaaacattttagcaga

SEQ ID NO: 2083 - DNA, 23 bp, Homo Sapiens
ggaatgaaaacattttagcagac

SEQ ID NO: 2084 - DNA, 23 bp, Homo Sapiens
gaatgaaaacattttagcagact

SEQ ID NO: 2085 - DNA, 23 bp, Homo Sapiens
aatgaaaacattttagcagactt

SEQ ID NO: 2086 - DNA, 23 bp, Homo Sapiens
atgaaaacattttagcagacttt

SEQ ID NO: 2087 - DNA, 23 bp, Homo Sapiens
tgaaaacattttagcagactttt

SEQ ID NO: 2088 - DNA, 23 bp, Homo Sapiens
gaaaacattttagcagacttttt

SEQ ID NO: 2089 - DNA, 23 bp, Homo Sapiens
aaaacattttagcagacttttta

SEQ ID NO: 2090 - DNA, 23 bp, Homo Sapiens
aaacattttagcagactttttaa

SEQ ID NO: 2091 - DNA, 23 bp, Homo Sapiens
aacattttagcagactttttaag

SEQ ID NO: 2092 - DNA, 23 bp, Homo Sapiens
acattttagcagactttttaagc

SEQ ID NO: 2093 - DNA, 23 bp, Homo Sapiens
cattttagcagactttttaagct

SEQ ID NO: 2094 - DNA, 23 bp, Homo Sapiens
attttagcagactttttaagctt

SEQ ID NO: 2095 - DNA, 23 bp, Homo Sapiens
ttttagcagactttttaagcttt

SEQ ID NO: 2096 - DNA, 23 bp, Homo Sapiens
tttagcagactttttaagctttc

SEQ ID NO: 2097 - DNA, 23 bp, Homo Sapiens
ttagcagactttttaagctttct

SEQ ID NO: 2098 - DNA, 23 bp, Homo Sapiens
tagcagactttttaagctttctt

SEQ ID NO: 2099 - DNA, 23 bp, Homo Sapiens
agcagactttttaagctttcttt

SEQ ID NO: 2100 - DNA, 23 bp, Homo Sapiens
gcagactttttaagctttcttta

SEQ ID NO: 2101 - DNA, 23 bp, Homo Sapiens
cagactttttaagctttctttag

SEQ ID NO: 2102 - DNA, 23 bp, Homo Sapiens
agactttttaagctttctttaga

SEQ ID NO: 2103 - DNA, 23 bp, Homo Sapiens
gactttttaagctttctttagaa

SEQ ID NO: 2104 - DNA, 23 bp, Homo Sapiens
actttttaagctttctttagaag

SEQ ID NO: 2105 - DNA, 23 bp, Homo Sapiens
ctttttaagctttctttagaaga

SEQ ID NO: 2106 - DNA, 23 bp, Homo Sapiens
tttttaagctttctttagaagaa

SEQ ID NO: 2107 - DNA, 24 bp, Homo Sapiens
tcagacagaaaaaagaggtagggc

SEQ ID NO: 2108 - DNA, 24 bp, Homo Sapiens
cagacagaaaaaagaggtagggcg

SEQ ID NO: 2109 - DNA, 24 bp, Homo Sapiens
agacagaaaaaagaggtagggcga

SEQ ID NO: 2110 - DNA, 24 bp, Homo Sapiens
gacagaaaaaagaggtagggcgac

SEQ ID NO: 2111 - DNA, 24 bp, Homo Sapiens
acagaaaaaagaggtagggcgaca

SEQ ID NO: 2112 - DNA, 24 bp, Homo Sapiens
cagaaaaaagaggtagggcgacag

SEQ ID NO: 2113 - DNA, 24 bp, Homo Sapiens
agaaaaaagaggtagggcgacaga

SEQ ID NO: 2114 - DNA, 24 bp, Homo Sapiens
gaaaaaagaggtagggcgacagat

SEQ ID NO: 2115 - DNA, 24 bp, Homo Sapiens
aaaaaagaggtagggcgacagatc

SEQ ID NO: 2116 - DNA, 24 bp, Homo Sapiens
aaaaagaggtagggcgacagatct

SEQ ID NO: 2117 - DNA, 24 bp, Homo Sapiens
aaaagaggtagggcgacagatcta

SEQ ID NO: 2118 - DNA, 24 bp, Homo Sapiens
aaagaggtagggcgacagatctaa

SEQ ID NO: 2119 - DNA, 24 bp, Homo Sapiens
aagaggtagggcgacagatctaat

SEQ ID NO: 2120 - DNA, 24 bp, Homo Sapiens
agaggtagggcgacagatctaata

SEQ ID NO: 2121 - DNA, 24 bp, Homo Sapiens
gaggtagggcgacagatctaatag

SEQ ID NO: 2122 - DNA, 24 bp, Homo Sapiens
aggtagggcgacagatctaatagg

SEQ ID NO: 2123 - DNA, 24 bp, Homo Sapiens
ggtagggcgacagatctaatagga

SEQ ID NO: 2124 - DNA, 24 bp, Homo Sapiens
gtagggcgacagatctaataggaa

SEQ ID NO: 2125 - DNA, 24 bp, Homo Sapiens
tagggcgacagatctaataggaat

SEQ ID NO: 2126 - DNA, 24 bp, Homo Sapiens
agggcgacagatctaataggaatg

SEQ ID NO: 2127 - DNA, 24 bp, Homo Sapiens
gggcgacagatctaataggaatga

SEQ ID NO: 2128 - DNA, 24 bp, Homo Sapiens
ggcgacagatctaataggaatgaa

SEQ ID NO: 2129 - DNA, 24 bp, Homo Sapiens
gcgacagatctaataggaatgaaa

SEQ ID NO: 2130 - DNA, 24 bp, Homo Sapiens
cgacagatctaataggaatgaaaa

SEQ ID NO: 2131 - DNA, 24 bp, Homo Sapiens
gacagatctaataggaatgaaaac

SEQ ID NO: 2132 - DNA, 24 bp, Homo Sapiens
acagatctaataggaatgaaaaca

SEQ ID NO: 2133 - DNA, 24 bp, Homo Sapiens
cagatctaataggaatgaaaacat

SEQ ID NO: 2134 - DNA, 24 bp, Homo Sapiens
agatctaataggaatgaaaacatt

SEQ ID NO: 2135 - DNA, 24 bp, Homo Sapiens
gatctaataggaatgaaaacattt

SEQ ID NO: 2136 - DNA, 24 bp, Homo Sapiens
atctaataggaatgaaaacatttt

SEQ ID NO: 2137 - DNA, 24 bp, Homo Sapiens
tctaataggaatgaaaacatttta

SEQ ID NO: 2138 - DNA, 24 bp, Homo Sapiens
ctaataggaatgaaaacattttag

SEQ ID NO: 2139 - DNA, 24 bp, Homo Sapiens
taataggaatgaaaacattttagc

SEQ ID NO: 2140 - DNA, 24 bp, Homo Sapiens
aataggaatgaaaacattttagca

SEQ ID NO: 2141 - DNA, 24 bp, Homo Sapiens
ataggaatgaaaacattttagcag

SEQ ID NO: 2142 - DNA, 24 bp, Homo Sapiens
taggaatgaaaacattttagcaga

SEQ ID NO: 2143 - DNA, 24 bp, Homo Sapiens
aggaatgaaaacattttagcagac

SEQ ID NO: 2144 - DNA, 24 bp, Homo Sapiens
ggaatgaaaacattttagcagact

SEQ ID NO: 2145 - DNA, 24 bp, Homo Sapiens
gaatgaaaacattttagcagactt

SEQ ID NO: 2146 - DNA, 24 bp, Homo Sapiens
aatgaaaacattttagcagacttt

SEQ ID NO: 2147 - DNA, 24 bp, Homo Sapiens
atgaaaacattttagcagactttt

SEQ ID NO: 2148 - DNA, 24 bp, Homo Sapiens
tgaaaacattttagcagacttttt

SEQ ID NO: 2149 - DNA, 24 bp, Homo Sapiens
gaaaacattttagcagacttttta

SEQ ID NO: 2150 - DNA, 24 bp, Homo Sapiens
aaaacattttagcagactttttaa

SEQ ID NO: 2151 - DNA, 24 bp, Homo Sapiens
aaacattttagcagactttttaag

SEQ ID NO: 2152 - DNA, 24 bp, Homo Sapiens
aacattttagcagactttttaagc

SEQ ID NO: 2153 - DNA, 24 bp, Homo Sapiens
acattttagcagactttttaagct

SEQ ID NO: 2154 - DNA, 24 bp, Homo Sapiens
cattttagcagactttttaagctt

SEQ ID NO: 2155 - DNA, 24 bp, Homo Sapiens
attttagcagactttttaagcttt

SEQ ID NO: 2156 - DNA, 24 bp, Homo Sapiens
ttttagcagactttttaagctttc

SEQ ID NO: 2157 - DNA, 24 bp, Homo Sapiens
tttagcagactttttaagctttct

SEQ ID NO: 2158 - DNA, 24 bp, Homo Sapiens
ttagcagactttttaagctttctt

SEQ ID NO: 2159 - DNA, 24 bp, Homo Sapiens
tagcagactttttaagctttcttt

SEQ ID NO: 2160 - DNA, 24 bp, Homo Sapiens
agcagactttttaagctttcttta

SEQ ID NO: 2161 - DNA, 24 bp, Homo Sapiens
gcagactttttaagctttctttag

SEQ ID NO: 2162 - DNA, 24 bp, Homo Sapiens
cagactttttaagctttctttaga

SEQ ID NO: 2163 - DNA, 24 bp, Homo Sapiens
agactttttaagctttctttagaa

SEQ ID NO: 2164 - DNA, 24 bp, Homo Sapiens
gactttttaagctttctttagaag

SEQ ID NO: 2165 - DNA, 24 bp, Homo Sapiens
actttttaagctttctttagaaga

SEQ ID NO: 2166 - DNA, 24 bp, Homo Sapiens
ctttttaagctttctttagaagaa

SEQ ID NO: 2167 - DNA, 24 bp, Homo Sapiens
tttttaagctttctttagaagaat

SEQ ID NO: 2168 - DNA, 25 bp, Homo Sapiens
gtcagacagaaaaaagaggtagggc

SEQ ID NO: 2169 - DNA, 25 bp, Homo Sapiens
tcagacagaaaaaagaggtagggcg

SEQ ID NO: 2170 - DNA, 25 bp, Homo Sapiens
cagacagaaaaaagaggtagggcga

SEQ ID NO: 2171 - DNA, 25 bp, Homo Sapiens
agacagaaaaaagaggtagggcgac

SEQ ID NO: 2172 - DNA, 25 bp, Homo Sapiens
gacagaaaaaagaggtagggcgaca

SEQ ID NO: 2173 - DNA, 25 bp, Homo Sapiens
acagaaaaaagaggtagggcgacag

SEQ ID NO: 2174 - DNA, 25 bp, Homo Sapiens
cagaaaaaagaggtagggcgacaga

SEQ ID NO: 2175 - DNA, 25 bp, Homo Sapiens
agaaaaaagaggtagggcgacagat

SEQ ID NO: 2176 - DNA, 25 bp, Homo Sapiens
gaaaaaagaggtagggcgacagatc

SEQ ID NO: 2177 - DNA, 25 bp, Homo Sapiens
aaaaaagaggtagggcgacagatct

SEQ ID NO: 2178 - DNA, 25 bp, Homo Sapiens
aaaaagaggtagggcgacagatcta

SEQ ID NO: 2179 - DNA, 25 bp, Homo Sapiens
aaaagaggtagggcgacagatctaa

SEQ ID NO: 2180 - DNA, 25 bp, Homo Sapiens
aaagaggtagggcgacagatctaat

SEQ ID NO: 2181 - DNA, 25 bp, Homo Sapiens
aagaggtagggcgacagatctaata

SEQ ID NO: 2182 - DNA, 25 bp, Homo Sapiens
agaggtagggcgacagatctaatag

SEQ ID NO: 2183 - DNA, 25 bp, Homo Sapiens
gaggtagggcgacagatctaatagg

SEQ ID NO: 2184 - DNA, 25 bp, Homo Sapiens
aggtagggcgacagatctaatagga

SEQ ID NO: 2185 - DNA, 25 bp, Homo Sapiens
ggtagggcgacagatctaataggaa

SEQ ID NO: 2186 - DNA, 25 bp, Homo Sapiens
gtagggcgacagatctaataggaat

SEQ ID NO: 2187 - DNA, 25 bp, Homo Sapiens
tagggcgacagatctaataggaatg

SEQ ID NO: 2188 - DNA, 25 bp, Homo Sapiens
agggcgacagatctaataggaatga

SEQ ID NO: 2189 - DNA, 25 bp, Homo Sapiens
gggcgacagatctaataggaatgaa

SEQ ID NO: 2190 - DNA, 25 bp, Homo Sapiens
ggcgacagatctaataggaatgaaa

SEQ ID NO: 2191 - DNA, 25 bp, Homo Sapiens
gcgacagatctaataggaatgaaaa

SEQ ID NO: 2192 - DNA, 25 bp, Homo Sapiens
cgacagatctaataggaatgaaaac

SEQ ID NO: 2193 - DNA, 25 bp, Homo Sapiens
gacagatctaataggaatgaaaaca

SEQ ID NO: 2194 - DNA, 25 bp, Homo Sapiens
acagatctaataggaatgaaaacat

SEQ ID NO: 2195 - DNA, 25 bp, Homo Sapiens
cagatctaataggaatgaaaacatt

SEQ ID NO: 2196 - DNA, 25 bp, Homo Sapiens
agatctaataggaatgaaaacattt

SEQ ID NO: 2197 - DNA, 25 bp, Homo Sapiens
gatctaataggaatgaaaacatttt

SEQ ID NO: 2198 - DNA, 25 bp, Homo Sapiens
atctaataggaatgaaaacatttta

SEQ ID NO: 2199 - DNA, 25 bp, Homo Sapiens
tctaataggaatgaaaacattttag

SEQ ID NO: 2200 - DNA, 25 bp, Homo Sapiens
ctaataggaatgaaaacattttagc

SEQ ID NO: 2201 - DNA, 25 bp, Homo Sapiens
taataggaatgaaaacattttagca

SEQ ID NO: 2202 - DNA, 25 bp, Homo Sapiens
aataggaatgaaaacattttagcag

SEQ ID NO: 2203 - DNA, 25 bp, Homo Sapiens
ataggaatgaaaacattttagcaga

SEQ ID NO: 2204 - DNA, 25 bp, Homo Sapiens
taggaatgaaaacattttagcagac

SEQ ID NO: 2205 - DNA, 25 bp, Homo Sapiens
aggaatgaaaacattttagcagact

SEQ ID NO: 2206 - DNA, 25 bp, Homo Sapiens
ggaatgaaaacattttagcagactt

SEQ ID NO: 2207 - DNA, 25 bp, Homo Sapiens
gaatgaaaacattttagcagacttt

SEQ ID NO: 2208 - DNA, 25 bp, Homo Sapiens
aatgaaaacattttagcagactttt

SEQ ID NO: 2209 - DNA, 25 bp, Homo Sapiens
atgaaaacattttagcagacttttt

SEQ ID NO: 2210 - DNA, 25 bp, Homo Sapiens
tgaaaacattttagcagacttttta

SEQ ID NO: 2211 - DNA, 25 bp, Homo Sapiens
gaaaacattttagcagactttttaa

SEQ ID NO: 2212 - DNA, 25 bp, Homo Sapiens
aaaacattttagcagactttttaag

SEQ ID NO: 2213 - DNA, 25 bp, Homo Sapiens
aaacattttagcagactttttaagc

SEQ ID NO: 2214 - DNA, 25 bp, Homo Sapiens
aacattttagcagactttttaagct

SEQ ID NO: 2215 - DNA, 25 bp, Homo Sapiens
acattttagcagactttttaagctt

SEQ ID NO: 2216 - DNA, 25 bp, Homo Sapiens
cattttagcagactttttaagcttt

SEQ ID NO: 2217 - DNA, 25 bp, Homo Sapiens
attttagcagactttttaagctttc

SEQ ID NO: 2218 - DNA, 25 bp, Homo Sapiens
ttttagcagactttttaagctttct

SEQ ID NO: 2219 - DNA, 25 bp, Homo Sapiens
tttagcagactttttaagctttctt

SEQ ID NO: 2220 - DNA, 25 bp, Homo Sapiens
ttagcagactttttaagctttcttt

SEQ ID NO: 2221 - DNA, 25 bp, Homo Sapiens
tagcagactttttaagctttcttta

SEQ ID NO: 2222 - DNA, 25 bp, Homo Sapiens
agcagactttttaagctttctttag

SEQ ID NO: 2223 - DNA, 25 bp, Homo Sapiens
gcagactttttaagctttctttaga

SEQ ID NO: 2224 - DNA, 25 bp, Homo Sapiens
cagactttttaagctttctttagaa

SEQ ID NO: 2225 - DNA, 25 bp, Homo Sapiens
agactttttaagctttctttagaag

SEQ ID NO: 2226 - DNA, 25 bp, Homo Sapiens
gactttttaagctttctttagaaga

SEQ ID NO: 2227 - DNA, 25 bp, Homo Sapiens
actttttaagctttctttagaagaa

SEQ ID NO: 2228 - DNA, 25 bp, Homo Sapiens
ctttttaagctttctttagaagaat

SEQ ID NO: 2229 - DNA, 25 bp, Homo Sapiens
tttttaagctttctttagaagaata

SEQ ID NO: 2230 - DNA, 26 bp, Homo Sapiens
tgtcagacagaaaaaagaggtagggc

SEQ ID NO: 2231 - DNA, 26 bp, Homo Sapiens
gtcagacagaaaaaagaggtagggcg

SEQ ID NO: 2232 - DNA, 26 bp, Homo Sapiens
tcagacagaaaaaagaggtagggcga

SEQ ID NO: 2233 - DNA, 26 bp, Homo Sapiens
cagacagaaaaaagaggtagggcgac

SEQ ID NO: 2234 - DNA, 26 bp, Homo Sapiens
agacagaaaaaagaggtagggcgaca

SEQ ID NO: 2235 - DNA, 26 bp, Homo Sapiens
gacagaaaaaagaggtagggcgacag

SEQ ID NO: 2236 - DNA, 26 bp, Homo Sapiens
acagaaaaaagaggtagggcgacaga

SEQ ID NO: 2237 - DNA, 26 bp, Homo Sapiens
cagaaaaaagaggtagggcgacagat

SEQ ID NO: 2238 - DNA, 26 bp, Homo Sapiens
agaaaaaagaggtagggcgacagatc

SEQ ID NO: 2239 - DNA, 26 bp, Homo Sapiens
gaaaaaagaggtagggcgacagatct

SEQ ID NO: 2240 - DNA, 26 bp, Homo Sapiens
aaaaaagaggtagggcgacagatcta

SEQ ID NO: 2241 - DNA, 26 bp, Homo Sapiens
aaaaagaggtagggcgacagatctaa

SEQ ID NO: 2242 - DNA, 26 bp, Homo Sapiens
aaaagaggtagggcgacagatctaat

SEQ ID NO: 2243 - DNA, 26 bp, Homo Sapiens
aaagaggtagggcgacagatctaata

SEQ ID NO: 2244 - DNA, 26 bp, Homo Sapiens
aagaggtagggcgacagatctaatag

SEQ ID NO: 2245 - DNA, 26 bp, Homo Sapiens
agaggtagggcgacagatctaatagg

SEQ ID NO: 2246 - DNA, 26 bp, Homo Sapiens
gaggtagggcgacagatctaatagga

SEQ ID NO: 2247 - DNA, 26 bp, Homo Sapiens
aggtagggcgacagatctaataggaa

SEQ ID NO: 2248 - DNA, 26 bp, Homo Sapiens
ggtagggcgacagatctaataggaat

SEQ ID NO: 2249 - DNA, 26 bp, Homo Sapiens
gtagggcgacagatctaataggaatg

SEQ ID NO: 2250 - DNA, 26 bp, Homo Sapiens
tagggcgacagatctaataggaatga

SEQ ID NO: 2251 - DNA, 26 bp, Homo Sapiens
agggcgacagatctaataggaatgaa

SEQ ID NO: 2252 - DNA, 26 bp, Homo Sapiens
gggcgacagatctaataggaatgaaa

SEQ ID NO: 2253 - DNA, 26 bp, Homo Sapiens
ggcgacagatctaataggaatgaaaa

SEQ ID NO: 2254 - DNA, 26 bp, Homo Sapiens
gcgacagatctaataggaatgaaaac

SEQ ID NO: 2255 - DNA, 26 bp, Homo Sapiens
cgacagatctaataggaatgaaaaca

SEQ ID NO: 2256 - DNA, 26 bp, Homo Sapiens
gacagatctaataggaatgaaaacat

SEQ ID NO: 2257 - DNA, 26 bp, Homo Sapiens
acagatctaataggaatgaaaacatt

SEQ ID NO: 2258 - DNA, 26 bp, Homo Sapiens
cagatctaataggaatgaaaacattt

SEQ ID NO: 2259 - DNA, 26 bp, Homo Sapiens
agatctaataggaatgaaaacatttt

SEQ ID NO: 2260 - DNA, 26 bp, Homo Sapiens
gatctaataggaatgaaaacatttta

SEQ ID NO: 2261 - DNA, 26 bp, Homo Sapiens
atctaataggaatgaaaacattttag

SEQ ID NO: 2262 - DNA, 26 bp, Homo Sapiens
tctaataggaatgaaaacattttagc

SEQ ID NO: 2263 - DNA, 26 bp, Homo Sapiens
ctaataggaatgaaaacattttagca

SEQ ID NO: 2264 - DNA, 26 bp, Homo Sapiens
taataggaatgaaaacattttagcag

SEQ ID NO: 2265 - DNA, 26 bp, Homo Sapiens
aataggaatgaaaacattttagcaga

SEQ ID NO: 2266 - DNA, 26 bp, Homo Sapiens
ataggaatgaaaacattttagcagac

SEQ ID NO: 2267 - DNA, 26 bp, Homo Sapiens
taggaatgaaaacattttagcagact

SEQ ID NO: 2268 - DNA, 26 bp, Homo Sapiens
aggaatgaaaacattttagcagactt

SEQ ID NO: 2269 - DNA, 26 bp, Homo Sapiens
ggaatgaaaacattttagcagacttt

SEQ ID NO: 2270 - DNA, 26 bp, Homo Sapiens
gaatgaaaacattttagcagactttt

SEQ ID NO: 2271 - DNA, 26 bp, Homo Sapiens
aatgaaaacattttagcagacttttt

SEQ ID NO: 2272 - DNA, 26 bp, Homo Sapiens
atgaaaacattttagcagacttttta

SEQ ID NO: 2273 - DNA, 26 bp, Homo Sapiens
tgaaaacattttagcagactttttaa

SEQ ID NO: 2274 - DNA, 26 bp, Homo Sapiens
gaaaacattttagcagactttttaag

SEQ ID NO: 2275 - DNA, 26 bp, Homo Sapiens
aaaacattttagcagactttttaagc

SEQ ID NO: 2276 - DNA, 26 bp, Homo Sapiens
aaacattttagcagactttttaagct

SEQ ID NO: 2277 - DNA, 26 bp, Homo Sapiens
aacattttagcagactttttaagctt

SEQ ID NO: 2278 - DNA, 26 bp, Homo Sapiens
acattttagcagactttttaagcttt

SEQ ID NO: 2279 - DNA, 26 bp, Homo Sapiens
cattttagcagactttttaagctttc

SEQ ID NO: 2280 - DNA, 26 bp, Homo Sapiens
attttagcagactttttaagctttct

SEQ ID NO: 2281 - DNA, 26 bp, Homo Sapiens
ttttagcagactttttaagctttctt

SEQ ID NO: 2282 - DNA, 26 bp, Homo Sapiens
tttagcagactttttaagctttcttt

SEQ ID NO: 2283 - DNA, 26 bp, Homo Sapiens
ttagcagactttttaagctttcttta

SEQ ID NO: 2284 - DNA, 26 bp, Homo Sapiens
tagcagactttttaagctttctttag

SEQ ID NO: 2285 - DNA, 26 bp, Homo Sapiens
agcagactttttaagctttctttaga

SEQ ID NO: 2286 - DNA, 26 bp, Homo Sapiens
gcagactttttaagctttctttagaa

SEQ ID NO: 2287 - DNA, 26 bp, Homo Sapiens
cagactttttaagctttctttagaag

SEQ ID NO: 2288 - DNA, 26 bp, Homo Sapiens
agactttttaagctttctttagaaga

SEQ ID NO: 2289 - DNA, 26 bp, Homo Sapiens
gactttttaagctttctttagaagaa

SEQ ID NO: 2290 - DNA, 26 bp, Homo Sapiens
actttttaagctttctttagaagaat

SEQ ID NO: 2291 - DNA, 26 bp, Homo Sapiens
ctttttaagctttctttagaagaata

SEQ ID NO: 2292 - DNA, 26 bp, Homo Sapiens
tttttaagctttctttagaagaatat

SEQ ID NO: 2293 - DNA, 27 bp, Homo Sapiens
ctgtcagacagaaaaaagaggtagggc

SEQ ID NO: 2294 - DNA, 27 bp, Homo Sapiens
tgtcagacagaaaaaagaggtagggcg

SEQ ID NO: 2295 - DNA, 27 bp, Homo Sapiens
gtcagacagaaaaaagaggtagggcga

SEQ ID NO: 2296 - DNA, 27 bp, Homo Sapiens
tcagacagaaaaaagaggtagggcgac

SEQ ID NO: 2297 - DNA, 27 bp, Homo Sapiens
cagacagaaaaaagaggtagggcgaca

SEQ ID NO: 2298 - DNA, 27 bp, Homo Sapiens
agacagaaaaaagaggtagggcgacag

SEQ ID NO: 2299 - DNA, 27 bp, Homo Sapiens
gacagaaaaaagaggtagggcgacaga

SEQ ID NO: 2300 - DNA, 27 bp, Homo Sapiens
acagaaaaaagaggtagggcgacagat

SEQ ID NO: 2301 - DNA, 27 bp, Homo Sapiens
cagaaaaaagaggtagggcgacagatc

SEQ ID NO: 2302 - DNA, 27 bp, Homo Sapiens
agaaaaaagaggtagggcgacagatct

SEQ ID NO: 2303 - DNA, 27 bp, Homo Sapiens
gaaaaaagaggtagggcgacagatcta

SEQ ID NO: 2304 - DNA, 27 bp, Homo Sapiens
aaaaaagaggtagggcgacagatctaa

SEQ ID NO: 2305 - DNA, 27 bp, Homo Sapiens
aaaaagaggtagggcgacagatctaat

SEQ ID NO: 2306 - DNA, 27 bp, Homo Sapiens
aaaagaggtagggcgacagatctaata

SEQ ID NO: 2307 - DNA, 27 bp, Homo Sapiens
aaagaggtagggcgacagatctaatag

SEQ ID NO: 2308 - DNA, 27 bp, Homo Sapiens
aagaggtagggcgacagatctaatagg

SEQ ID NO: 2309 - DNA, 27 bp, Homo Sapiens
agaggtagggcgacagatctaatagga

SEQ ID NO: 2310 - DNA, 27 bp, Homo Sapiens
gaggtagggcgacagatctaataggaa

SEQ ID NO: 2311 - DNA, 27 bp, Homo Sapiens
aggtagggcgacagatctaataggaat

SEQ ID NO: 2312 - DNA, 27 bp, Homo Sapiens
ggtagggcgacagatctaataggaatg

SEQ ID NO: 2313 - DNA, 27 bp, Homo Sapiens
gtagggcgacagatctaataggaatga

SEQ ID NO: 2314 - DNA, 27 bp, Homo Sapiens
tagggcgacagatctaataggaatgaa

SEQ ID NO: 2315 - DNA, 27 bp, Homo Sapiens
agggcgacagatctaataggaatgaaa

SEQ ID NO: 2316 - DNA, 27 bp, Homo Sapiens
gggcgacagatctaataggaatgaaaa

SEQ ID NO: 2317 - DNA, 27 bp, Homo Sapiens
ggcgacagatctaataggaatgaaaac

SEQ ID NO: 2318 - DNA, 27 bp, Homo Sapiens
gcgacagatctaataggaatgaaaaca

SEQ ID NO: 2319 - DNA, 27 bp, Homo Sapiens
cgacagatctaataggaatgaaaacat

SEQ ID NO: 2320 - DNA, 27 bp, Homo Sapiens
gacagatctaataggaatgaaaacatt

SEQ ID NO: 2321 - DNA, 27 bp, Homo Sapiens
acagatctaataggaatgaaaacattt

SEQ ID NO: 2322 - DNA, 27 bp, Homo Sapiens
cagatctaataggaatgaaaacatttt

SEQ ID NO: 2323 - DNA, 27 bp, Homo Sapiens
agatctaataggaatgaaaacatttta

SEQ ID NO: 2324 - DNA, 27 bp, Homo Sapiens
gatctaataggaatgaaaacattttag

SEQ ID NO: 2325 - DNA, 27 bp, Homo Sapiens
atctaataggaatgaaaacattttagc

SEQ ID NO: 2326 - DNA, 27 bp, Homo Sapiens
tctaataggaatgaaaacattttagca

SEQ ID NO: 2327 - DNA, 27 bp, Homo Sapiens
ctaataggaatgaaaacattttagcag

SEQ ID NO: 2328 - DNA, 27 bp, Homo Sapiens
taataggaatgaaaacattttagcaga

SEQ ID NO: 2329 - DNA, 27 bp, Homo Sapiens
aataggaatgaaaacattttagcagac

SEQ ID NO: 2330 - DNA, 27 bp, Homo Sapiens
ataggaatgaaaacattttagcagact

SEQ ID NO: 2331 - DNA, 27 bp, Homo Sapiens
taggaatgaaaacattttagcagactt

SEQ ID NO: 2332 - DNA, 27 bp, Homo Sapiens
aggaatgaaaacattttagcagacttt

SEQ ID NO: 2333 - DNA, 27 bp, Homo Sapiens
ggaatgaaaacattttagcagactttt

SEQ ID NO: 2334 - DNA, 27 bp, Homo Sapiens
gaatgaaaacattttagcagacttttt

SEQ ID NO: 2335 - DNA, 27 bp, Homo Sapiens
aatgaaaacattttagcagacttttta

SEQ ID NO: 2336 - DNA, 27 bp, Homo Sapiens
atgaaaacattttagcagactttttaa

SEQ ID NO: 2337 - DNA, 27 bp, Homo Sapiens
tgaaaacattttagcagactttttaag

SEQ ID NO: 2338 - DNA, 27 bp, Homo Sapiens
gaaaacattttagcagactttttaagc

SEQ ID NO: 2339 - DNA, 27 bp, Homo Sapiens
aaaacattttagcagactttttaagct

SEQ ID NO: 2340 - DNA, 27 bp, Homo Sapiens
aaacattttagcagactttttaagctt

SEQ ID NO: 2341 - DNA, 27 bp, Homo Sapiens
aacattttagcagactttttaagcttt

SEQ ID NO: 2342 - DNA, 27 bp, Homo Sapiens
acattttagcagactttttaagctttc

SEQ ID NO: 2343 - DNA, 27 bp, Homo Sapiens
cattttagcagactttttaagctttct

SEQ ID NO: 2344 - DNA, 27 bp, Homo Sapiens
attttagcagactttttaagctttctt

SEQ ID NO: 2345 - DNA, 27 bp, Homo Sapiens
ttttagcagactttttaagctttcttt

SEQ ID NO: 2346 - DNA, 27 bp, Homo Sapiens
tttagcagactttttaagctttcttta

SEQ ID NO: 2347 - DNA, 27 bp, Homo Sapiens
ttagcagactttttaagctttctttag

SEQ ID NO: 2348 - DNA, 27 bp, Homo Sapiens
tagcagactttttaagctttctttaga

SEQ ID NO: 2349 - DNA, 27 bp, Homo Sapiens
agcagactttttaagctttctttagaa

SEQ ID NO: 2350 - DNA, 27 bp, Homo Sapiens
gcagactttttaagctttctttagaag

SEQ ID NO: 2351 - DNA, 27 bp, Homo Sapiens
cagactttttaagctttctttagaaga

SEQ ID NO: 2352 - DNA, 27 bp, Homo Sapiens
agactttttaagctttctttagaagaa

SEQ ID NO: 2353 - DNA, 27 bp, Homo Sapiens
gactttttaagctttctttagaagaat

SEQ ID NO: 2354 - DNA, 27 bp, Homo Sapiens
actttttaagctttctttagaagaata

SEQ ID NO: 2355 - DNA, 27 bp, Homo Sapiens
ctttttaagctttctttagaagaatat

SEQ ID NO: 2356 - DNA, 27 bp, Homo Sapiens
tttttaagctttctttagaagaatatt

SEQ ID NO: 2357 - DNA, 28 bp, Homo Sapiens
gctgtcagacagaaaaaagaggtagggc

SEQ ID NO: 2358 - DNA, 28 bp, Homo Sapiens
ctgtcagacagaaaaaagaggtagggcg

SEQ ID NO: 2359 - DNA, 28 bp, Homo Sapiens
tgtcagacagaaaaaagaggtagggcga

SEQ ID NO: 2360 - DNA, 28 bp, Homo Sapiens
gtcagacagaaaaaagaggtagggcgac

SEQ ID NO: 2361 - DNA, 28 bp, Homo Sapiens
tcagacagaaaaaagaggtagggcgaca

SEQ ID NO: 2362 - DNA, 28 bp, Homo Sapiens
cagacagaaaaaagaggtagggcgacag

SEQ ID NO: 2363 - DNA, 28 bp, Homo Sapiens
agacagaaaaaagaggtagggcgacaga

SEQ ID NO: 2364 - DNA, 28 bp, Homo Sapiens
gacagaaaaaagaggtagggcgacagat

SEQ ID NO: 2365 - DNA, 28 bp, Homo Sapiens
acagaaaaaagaggtagggcgacagatc

SEQ ID NO: 2366 - DNA, 28 bp, Homo Sapiens
cagaaaaaagaggtagggcgacagatct

SEQ ID NO: 2367 - DNA, 28 bp, Homo Sapiens
agaaaaaagaggtagggcgacagatcta

SEQ ID NO: 2368 - DNA, 28 bp, Homo Sapiens
gaaaaaagaggtagggcgacagatctaa

SEQ ID NO: 2369 - DNA, 28 bp, Homo Sapiens
aaaaaagaggtagggcgacagatctaat

SEQ ID NO: 2370 - DNA, 28 bp, Homo Sapiens
aaaaagaggtagggcgacagatctaata

SEQ ID NO: 2371 - DNA, 28 bp, Homo Sapiens
aaaagaggtagggcgacagatctaatag

SEQ ID NO: 2372 - DNA, 28 bp, Homo Sapiens
aaagaggtagggcgacagatctaatagg

SEQ ID NO: 2373 - DNA, 28 bp, Homo Sapiens
aagaggtagggcgacagatctaatagga

SEQ ID NO: 2374 - DNA, 28 bp, Homo Sapiens
agaggtagggcgacagatctaataggaa

SEQ ID NO: 2375 - DNA, 28 bp, Homo Sapiens
gaggtagggcgacagatctaataggaat

SEQ ID NO: 2376 - DNA, 28 bp, Homo Sapiens
aggtagggcgacagatctaataggaatg

SEQ ID NO: 2377 - DNA, 28 bp, Homo Sapiens
ggtagggcgacagatctaataggaatga

SEQ ID NO: 2378 - DNA, 28 bp, Homo Sapiens
gtagggcgacagatctaataggaatgaa

SEQ ID NO: 2379 - DNA, 28 bp, Homo Sapiens
tagggcgacagatctaataggaatgaaa

SEQ ID NO: 2380 - DNA, 28 bp, Homo Sapiens
agggcgacagatctaataggaatgaaaa

SEQ ID NO: 2381 - DNA, 28 bp, Homo Sapiens
gggcgacagatctaataggaatgaaaac

SEQ ID NO: 2382 - DNA, 28 bp, Homo Sapiens
ggcgacagatctaataggaatgaaaaca

SEQ ID NO: 2383 - DNA, 28 bp, Homo Sapiens
gcgacagatctaataggaatgaaaacat

SEQ ID NO: 2384 - DNA, 28 bp, Homo Sapiens
cgacagatctaataggaatgaaaacatt

SEQ ID NO: 2385 - DNA, 28 bp, Homo Sapiens
gacagatctaataggaatgaaaacattt

SEQ ID NO: 2386 - DNA, 28 bp, Homo Sapiens
acagatctaataggaatgaaaacatttt

SEQ ID NO: 2387 - DNA, 28 bp, Homo Sapiens
cagatctaataggaatgaaaacatttta

SEQ ID NO: 2388 - DNA, 28 bp, Homo Sapiens
agatctaataggaatgaaaacattttag

SEQ ID NO: 2389 - DNA, 28 bp, Homo Sapiens
gatctaataggaatgaaaacattttagc

SEQ ID NO: 2390 - DNA, 28 bp, Homo Sapiens
atctaataggaatgaaaacattttagca

SEQ ID NO: 2391 - DNA, 28 bp, Homo Sapiens
tctaataggaatgaaaacattttagcag

SEQ ID NO: 2392 - DNA, 28 bp, Homo Sapiens
ctaataggaatgaaaacattttagcaga

SEQ ID NO: 2393 - DNA, 28 bp, Homo Sapiens
taataggaatgaaaacattttagcagac

SEQ ID NO: 2394 - DNA, 28 bp, Homo Sapiens
aataggaatgaaaacattttagcagact

SEQ ID NO: 2395 - DNA, 28 bp, Homo Sapiens
ataggaatgaaaacattttagcagactt

SEQ ID NO: 2396 - DNA, 28 bp, Homo Sapiens
taggaatgaaaacattttagcagacttt

SEQ ID NO: 2397 - DNA, 28 bp, Homo Sapiens
aggaatgaaaacattttagcagactttt

SEQ ID NO: 2398 - DNA, 28 bp, Homo Sapiens
ggaatgaaaacattttagcagacttttt

SEQ ID NO: 2399 - DNA, 28 bp, Homo Sapiens
gaatgaaaacattttagcagacttttta

SEQ ID NO: 2400 - DNA, 28 bp, Homo Sapiens
aatgaaaacattttagcagactttttaa

SEQ ID NO: 2401 - DNA, 28 bp, Homo Sapiens
atgaaaacattttagcagactttttaag

SEQ ID NO: 2402 - DNA, 28 bp, Homo Sapiens
tgaaaacattttagcagactttttaagc

SEQ ID NO: 2403 - DNA, 28 bp, Homo Sapiens
gaaaacattttagcagactttttaagct

SEQ ID NO: 2404 - DNA, 28 bp, Homo Sapiens
aaaacattttagcagactttttaagctt

SEQ ID NO: 2405 - DNA, 28 bp, Homo Sapiens
aaacattttagcagactttttaagcttt

SEQ ID NO: 2406 - DNA, 28 bp, Homo Sapiens
aacattttagcagactttttaagctttc

SEQ ID NO: 2407 - DNA, 28 bp, Homo Sapiens
acattttagcagactttttaagctttct

SEQ ID NO: 2408 - DNA, 28 bp, Homo Sapiens
cattttagcagactttttaagctttctt

SEQ ID NO: 2409 - DNA, 28 bp, Homo Sapiens
attttagcagactttttaagctttcttt

SEQ ID NO: 2410 - DNA, 28 bp, Homo Sapiens
ttttagcagactttttaagctttcttta

SEQ ID NO: 2411 - DNA, 28 bp, Homo Sapiens
tttagcagactttttaagctttctttag

SEQ ID NO: 2412 - DNA, 28 bp, Homo Sapiens
ttagcagactttttaagctttctttaga

SEQ ID NO: 2413 - DNA, 28 bp, Homo Sapiens
tagcagactttttaagctttctttagaa

SEQ ID NO: 2414 - DNA, 28 bp, Homo Sapiens
agcagactttttaagctttctttagaag

SEQ ID NO: 2415 - DNA, 28 bp, Homo Sapiens
gcagactttttaagctttctttagaaga

SEQ ID NO: 2416 - DNA, 28 bp, Homo Sapiens
cagactttttaagctttctttagaagaa

SEQ ID NO: 2417 - DNA, 28 bp, Homo Sapiens
agactttttaagctttctttagaagaat

SEQ ID NO: 2418 - DNA, 28 bp, Homo Sapiens
gactttttaagctttctttagaagaata

SEQ ID NO: 2419 - DNA, 28 bp, Homo Sapiens
actttttaagctttctttagaagaatat

SEQ ID NO: 2420 - DNA, 28 bp, Homo Sapiens
ctttttaagctttctttagaagaatatt

SEQ ID NO: 2421 - DNA, 28 bp, Homo Sapiens
tttttaagctttctttagaagaatattt

SEQ ID NO: 2422 - DNA, 29 bp, Homo Sapiens
agctgtcagacagaaaaaagaggtagggc

SEQ ID NO: 2423 - DNA, 29 bp, Homo Sapiens
gctgtcagacagaaaaaagaggtagggcg

SEQ ID NO: 2424 - DNA, 29 bp, Homo Sapiens
ctgtcagacagaaaaaagaggtagggcga

SEQ ID NO: 2425 - DNA, 29 bp, Homo Sapiens
tgtcagacagaaaaaagaggtagggcgac

SEQ ID NO: 2426 - DNA, 29 bp, Homo Sapiens
gtcagacagaaaaaagaggtagggcgaca

SEQ ID NO: 2427 - DNA, 29 bp, Homo Sapiens
tcagacagaaaaaagaggtagggcgacag

SEQ ID NO: 2428 - DNA, 29 bp, Homo Sapiens
cagacagaaaaaagaggtagggcgacaga

SEQ ID NO: 2429 - DNA, 29 bp, Homo Sapiens
agacagaaaaaagaggtagggcgacagat

SEQ ID NO: 2430 - DNA, 29 bp, Homo Sapiens
gacagaaaaaagaggtagggcgacagatc

SEQ ID NO: 2431 - DNA, 29 bp, Homo Sapiens
acagaaaaaagaggtagggcgacagatct

SEQ ID NO: 2432 - DNA, 29 bp, Homo Sapiens
cagaaaaaagaggtagggcgacagatcta

SEQ ID NO: 2433 - DNA, 29 bp, Homo Sapiens
agaaaaaagaggtagggcgacagatctaa

SEQ ID NO: 2434 - DNA, 29 bp, Homo Sapiens
gaaaaaagaggtagggcgacagatctaat

SEQ ID NO: 2435 - DNA, 29 bp, Homo Sapiens
aaaaaagaggtagggcgacagatctaata

SEQ ID NO: 2436 - DNA, 29 bp, Homo Sapiens
aaaaagaggtagggcgacagatctaatag

SEQ ID NO: 2437 - DNA, 29 bp, Homo Sapiens
aaaagaggtagggcgacagatctaatagg

SEQ ID NO: 2438 - DNA, 29 bp, Homo Sapiens
aaagaggtagggcgacagatctaatagga

SEQ ID NO: 2439 - DNA, 29 bp, Homo Sapiens
aagaggtagggcgacagatctaataggaa

SEQ ID NO: 2440 - DNA, 29 bp, Homo Sapiens
agaggtagggcgacagatctaataggaat

SEQ ID NO: 2441 - DNA, 29 bp, Homo Sapiens
gaggtagggcgacagatctaataggaatg

SEQ ID NO: 2442 - DNA, 29 bp, Homo Sapiens
aggtagggcgacagatctaataggaatga

SEQ ID NO: 2443 - DNA, 29 bp, Homo Sapiens
ggtagggcgacagatctaataggaatgaa

SEQ ID NO: 2444 - DNA, 29 bp, Homo Sapiens
gtagggcgacagatctaataggaatgaaa

SEQ ID NO: 2445 - DNA, 29 bp, Homo Sapiens
tagggcgacagatctaataggaatgaaaa

SEQ ID NO: 2446 - DNA, 29 bp, Homo Sapiens
agggcgacagatctaataggaatgaaaac

SEQ ID NO: 2447 - DNA, 29 bp, Homo Sapiens
gggcgacagatctaataggaatgaaaaca

SEQ ID NO: 2448 - DNA, 29 bp, Homo Sapiens
ggcgacagatctaataggaatgaaaacat

SEQ ID NO: 2449 - DNA, 29 bp, Homo Sapiens
gcgacagatctaataggaatgaaaacatt

SEQ ID NO: 2450 - DNA, 29 bp, Homo Sapiens
cgacagatctaataggaatgaaaacattt

SEQ ID NO: 2451 - DNA, 29 bp, Homo Sapiens
gacagatctaataggaatgaaaacatttt

SEQ ID NO: 2452 - DNA, 29 bp, Homo Sapiens
acagatctaataggaatgaaaacatttta

SEQ ID NO: 2453 - DNA, 29 bp, Homo Sapiens
cagatctaataggaatgaaaacattttag

SEQ ID NO: 2454 - DNA, 29 bp, Homo Sapiens
agatctaataggaatgaaaacattttagc

SEQ ID NO: 2455 - DNA, 29 bp, Homo Sapiens
gatctaataggaatgaaaacattttagca

SEQ ID NO: 2456 - DNA, 29 bp, Homo Sapiens
atctaataggaatgaaaacattttagcag

SEQ ID NO: 2457 - DNA, 29 bp, Homo Sapiens
tctaataggaatgaaaacattttagcaga

SEQ ID NO: 2458 - DNA, 29 bp, Homo Sapiens
ctaataggaatgaaaacattttagcagac

SEQ ID NO: 2459 - DNA, 29 bp, Homo Sapiens
taataggaatgaaaacattttagcagact

SEQ ID NO: 2460 - DNA, 29 bp, Homo Sapiens
aataggaatgaaaacattttagcagactt

SEQ ID NO: 2461 - DNA, 29 bp, Homo Sapiens
ataggaatgaaaacattttagcagacttt

SEQ ID NO: 2462 - DNA, 29 bp, Homo Sapiens
taggaatgaaaacattttagcagactttt

SEQ ID NO: 2463 - DNA, 29 bp, Homo Sapiens
aggaatgaaaacattttagcagacttttt

SEQ ID NO: 2464 - DNA, 29 bp, Homo Sapiens
ggaatgaaaacattttagcagacttttta

SEQ ID NO: 2465 - DNA, 29 bp, Homo Sapiens
gaatgaaaacattttagcagactttttaa

SEQ ID NO: 2466 - DNA, 29 bp, Homo Sapiens
aatgaaaacattttagcagactttttaag

SEQ ID NO: 2467 - DNA, 29 bp, Homo Sapiens
atgaaaacattttagcagactttttaagc

SEQ ID NO: 2468 - DNA, 29 bp, Homo Sapiens
tgaaaacattttagcagactttttaagct

SEQ ID NO: 2469 - DNA, 29 bp, Homo Sapiens
gaaaacattttagcagactttttaagctt

SEQ ID NO: 2470 - DNA, 29 bp, Homo Sapiens
aaaacattttagcagactttttaagcttt

SEQ ID NO: 2471 - DNA, 29 bp, Homo Sapiens
aaacattttagcagactttttaagctttc

SEQ ID NO: 2472 - DNA, 29 bp, Homo Sapiens
aacattttagcagactttttaagctttct

SEQ ID NO: 2473 - DNA, 29 bp, Homo Sapiens
acattttagcagactttttaagctttctt

SEQ ID NO: 2474 - DNA, 29 bp, Homo Sapiens
cattttagcagactttttaagctttcttt

SEQ ID NO: 2475 - DNA, 29 bp, Homo Sapiens
attttagcagactttttaagctttcttta

SEQ ID NO: 2476 - DNA, 29 bp, Homo Sapiens
ttttagcagactttttaagctttctttag

SEQ ID NO: 2477 - DNA, 29 bp, Homo Sapiens
tttagcagactttttaagctttctttaga

SEQ ID NO: 2478 - DNA, 29 bp, Homo Sapiens
ttagcagactttttaagctttctttagaa

SEQ ID NO: 2479 - DNA, 29 bp, Homo Sapiens
tagcagactttttaagctttctttagaag

SEQ ID NO: 2480 - DNA, 29 bp, Homo Sapiens
agcagactttttaagctttctttagaaga

SEQ ID NO: 2481 - DNA, 29 bp, Homo Sapiens
gcagactttttaagctttctttagaagaa

SEQ ID NO: 2482 - DNA, 29 bp, Homo Sapiens
cagactttttaagctttctttagaagaat

SEQ ID NO: 2483 - DNA, 29 bp, Homo Sapiens
agactttttaagctttctttagaagaata

SEQ ID NO: 2484 - DNA, 29 bp, Homo Sapiens
gactttttaagctttctttagaagaatat

SEQ ID NO: 2485 - DNA, 29 bp, Homo Sapiens
actttttaagctttctttagaagaatatt

SEQ ID NO: 2486 - DNA, 29 bp, Homo Sapiens
ctttttaagctttctttagaagaatattt

SEQ ID NO: 2487 - DNA, 29 bp, Homo Sapiens
tttttaagctttctttagaagaatatttc

SEQ ID NO: 2488 - DNA, 30 bp, Homo Sapiens
cagctgtcagacagaaaaaagaggtagggc

SEQ ID NO: 2489 - DNA, 30 bp, Homo Sapiens
agctgtcagacagaaaaaagaggtagggcg

SEQ ID NO: 2490 - DNA, 30 bp, Homo Sapiens
gctgtcagacagaaaaaagaggtagggcga

SEQ ID NO: 2491 - DNA, 30 bp, Homo Sapiens
ctgtcagacagaaaaaagaggtagggcgac

SEQ ID NO: 2492 - DNA, 30 bp, Homo Sapiens
tgtcagacagaaaaaagaggtagggcgaca

SEQ ID NO: 2493 - DNA, 30 bp, Homo Sapiens
gtcagacagaaaaaagaggtagggcgacag

SEQ ID NO: 2494 - DNA, 30 bp, Homo Sapiens
tcagacagaaaaaagaggtagggcgacaga

SEQ ID NO: 2495 - DNA, 30 bp, Homo Sapiens
cagacagaaaaaagaggtagggcgacagat

SEQ ID NO: 2496 - DNA, 30 bp, Homo Sapiens
agacagaaaaaagaggtagggcgacagatc

SEQ ID NO: 2497 - DNA, 30 bp, Homo Sapiens
gacagaaaaaagaggtagggcgacagatct

SEQ ID NO: 2498 - DNA, 30 bp, Homo Sapiens
acagaaaaaagaggtagggcgacagatcta

SEQ ID NO: 2499 - DNA, 30 bp, Homo Sapiens
cagaaaaaagaggtagggcgacagatctaa

SEQ ID NO: 2500 - DNA, 30 bp, Homo Sapiens
agaaaaaagaggtagggcgacagatctaat

SEQ ID NO: 2501 - DNA, 30 bp, Homo Sapiens
gaaaaaagaggtagggcgacagatctaata

SEQ ID NO: 2502 - DNA, 30 bp, Homo Sapiens
aaaaaagaggtagggcgacagatctaatag

SEQ ID NO: 2503 - DNA, 30 bp, Homo Sapiens
aaaaagaggtagggcgacagatctaatagg

SEQ ID NO: 2504 - DNA, 30 bp, Homo Sapiens
aaaagaggtagggcgacagatctaatagga

SEQ ID NO: 2505 - DNA, 30 bp, Homo Sapiens
aaagaggtagggcgacagatctaataggaa

SEQ ID NO: 2506 - DNA, 30 bp, Homo Sapiens
aagaggtagggcgacagatctaataggaat

SEQ ID NO: 2507 - DNA, 30 bp, Homo Sapiens
agaggtagggcgacagatctaataggaatg

SEQ ID NO: 2508 - DNA, 30 bp, Homo Sapiens
gaggtagggcgacagatctaataggaatga

SEQ ID NO: 2509 - DNA, 30 bp, Homo Sapiens
aggtagggcgacagatctaataggaatgaa

SEQ ID NO: 2510 - DNA, 30 bp, Homo Sapiens
ggtagggcgacagatctaataggaatgaaa

SEQ ID NO: 2511 - DNA, 30 bp, Homo Sapiens
gtagggcgacagatctaataggaatgaaaa

SEQ ID NO: 2512 - DNA, 30 bp, Homo Sapiens
tagggcgacagatctaataggaatgaaaac

SEQ ID NO: 2513 - DNA, 30 bp, Homo Sapiens
agggcgacagatctaataggaatgaaaaca

SEQ ID NO: 2514 - DNA, 30 bp, Homo Sapiens
gggcgacagatctaataggaatgaaaacat

SEQ ID NO: 2515 - DNA, 30 bp, Homo Sapiens
ggcgacagatctaataggaatgaaaacatt

SEQ ID NO: 2516 - DNA, 30 bp, Homo Sapiens
gcgacagatctaataggaatgaaaacattt

SEQ ID NO: 2517 - DNA, 30 bp, Homo Sapiens
cgacagatctaataggaatgaaaacatttt

SEQ ID NO: 2518 - DNA, 30 bp, Homo Sapiens
gacagatctaataggaatgaaaacatttta

SEQ ID NO: 2519 - DNA, 30 bp, Homo Sapiens
acagatctaataggaatgaaaacattttag

SEQ ID NO: 2520 - DNA, 30 bp, Homo Sapiens
cagatctaataggaatgaaaacattttagc

SEQ ID NO: 2521 - DNA, 30 bp, Homo Sapiens
agatctaataggaatgaaaacattttagca

SEQ ID NO: 2522 - DNA, 30 bp, Homo Sapiens
gatctaataggaatgaaaacattttagcag

SEQ ID NO: 2523 - DNA, 30 bp, Homo Sapiens
atctaataggaatgaaaacattttagcaga

SEQ ID NO: 2524 - DNA, 30 bp, Homo Sapiens
tctaataggaatgaaaacattttagcagac

SEQ ID NO: 2525 - DNA, 30 bp, Homo Sapiens
ctaataggaatgaaaacattttagcagact

SEQ ID NO: 2526 - DNA, 30 bp, Homo Sapiens
taataggaatgaaaacattttagcagactt

SEQ ID NO: 2527 - DNA, 30 bp, Homo Sapiens
aataggaatgaaaacattttagcagacttt

SEQ ID NO: 2528 - DNA, 30 bp, Homo Sapiens
ataggaatgaaaacattttagcagactttt

SEQ ID NO: 2529 - DNA, 30 bp, Homo Sapiens
taggaatgaaaacattttagcagacttttt

SEQ ID NO: 2530 - DNA, 30 bp, Homo Sapiens
aggaatgaaaacattttagcagacttttta

SEQ ID NO: 2531 - DNA, 30 bp, Homo Sapiens
ggaatgaaaacattttagcagactttttaa

SEQ ID NO: 2532 - DNA, 30 bp, Homo Sapiens
gaatgaaaacattttagcagactttttaag

SEQ ID NO: 2533 - DNA, 30 bp, Homo Sapiens
aatgaaaacattttagcagactttttaagc

SEQ ID NO: 2534 - DNA, 30 bp, Homo Sapiens
atgaaaacattttagcagactttttaagct

SEQ ID NO: 2535 - DNA, 30 bp, Homo Sapiens
tgaaaacattttagcagactttttaagctt

SEQ ID NO: 2536 - DNA, 30 bp, Homo Sapiens
gaaaacattttagcagactttttaagcttt

SEQ ID NO: 2537 - DNA, 30 bp, Homo Sapiens
aaaacattttagcagactttttaagctttc

SEQ ID NO: 2538 - DNA, 30 bp, Homo Sapiens
aaacattttagcagactttttaagctttct

SEQ ID NO: 2539 - DNA, 30 bp, Homo Sapiens
aacattttagcagactttttaagctttctt

SEQ ID NO: 2540 - DNA, 30 bp, Homo Sapiens
acattttagcagactttttaagctttcttt

SEQ ID NO: 2541 - DNA, 30 bp, Homo Sapiens
cattttagcagactttttaagctttcttta

SEQ ID NO: 2542 - DNA, 30 bp, Homo Sapiens
attttagcagactttttaagctttctttag

SEQ ID NO: 2543 - DNA, 30 bp, Homo Sapiens
ttttagcagactttttaagctttctttaga

SEQ ID NO: 2544 - DNA, 30 bp, Homo Sapiens
tttagcagactttttaagctttctttagaa

SEQ ID NO: 2545 - DNA, 30 bp, Homo Sapiens
ttagcagactttttaagctttctttagaag

SEQ ID NO: 2546 - DNA, 30 bp, Homo Sapiens
tagcagactttttaagctttctttagaaga

SEQ ID NO: 2547 - DNA, 30 bp, Homo Sapiens
agcagactttttaagctttctttagaagaa

SEQ ID NO: 2548 - DNA, 30 bp, Homo Sapiens
gcagactttttaagctttctttagaagaat

SEQ ID NO: 2549 - DNA, 30 bp, Homo Sapiens
cagactttttaagctttctttagaagaata

SEQ ID NO: 2550 - DNA, 30 bp, Homo Sapiens
agactttttaagctttctttagaagaatat

SEQ ID NO: 2551 - DNA, 30 bp, Homo Sapiens
gactttttaagctttctttagaagaatatt

SEQ ID NO: 2552 - DNA, 30 bp, Homo Sapiens
actttttaagctttctttagaagaatattt

SEQ ID NO: 2553 - DNA, 30 bp, Homo Sapiens
ctttttaagctttctttagaagaatatttc

SEQ ID NO: 2554 - DNA, 30 bp, Homo Sapiens
tttttaagctttctttagaagaatatttca

SEQ ID NO: 2555 - DNA, 15 bp, Homo Sapiens
gccctacctcttttt

SEQ ID NO: 2556 - DNA, 15 bp, Homo Sapiens
cgccctacctctttt

SEQ ID NO: 2557 - DNA, 15 bp, Homo Sapiens
tcgccctacctcttt

SEQ ID NO: 2558 - DNA, 15 bp, Homo Sapiens
gtcgccctacctctt

SEQ ID NO: 2559 - DNA, 15 bp, Homo Sapiens
tgtcgccctacctct

SEQ ID NO: 2560 - DNA, 15 bp, Homo Sapiens
ctgtcgccctacctc

SEQ ID NO: 2561 - DNA, 15 bp, Homo Sapiens
tctgtcgccctacct

SEQ ID NO: 2562 - DNA, 15 bp, Homo Sapiens
atctgtcgccctacc

SEQ ID NO: 2563 - DNA, 15 bp, Homo Sapiens
gatctgtcgccctac

SEQ ID NO: 2564 - DNA, 15 bp, Homo Sapiens
agatctgtcgcccta

SEQ ID NO: 2565 - DNA, 15 bp, Homo Sapiens
tagatctgtcgccct

SEQ ID NO: 2566 - DNA, 15 bp, Homo Sapiens
ttagatctgtcgccc

SEQ ID NO: 2567 - DNA, 15 bp, Homo Sapiens
attagatctgtcgcc

SEQ ID NO: 2568 - DNA, 15 bp, Homo Sapiens
tattagatctgtcgc

SEQ ID NO: 2569 - DNA, 15 bp, Homo Sapiens
ctattagatctgtcg

SEQ ID NO: 2570 - DNA, 15 bp, Homo Sapiens
cctattagatctgtc

SEQ ID NO: 2571 - DNA, 15 bp, Homo Sapiens
tcctattagatctgt

SEQ ID NO: 2572 - DNA, 15 bp, Homo Sapiens
ttcctattagatctg

SEQ ID NO: 2573 - DNA, 15 bp, Homo Sapiens
attcctattagatct

SEQ ID NO: 2574 - DNA, 15 bp, Homo Sapiens
cattcctattagatc

SEQ ID NO: 2575 - DNA, 15 bp, Homo Sapiens
tcattcctattagat

SEQ ID NO: 2576 - DNA, 15 bp, Homo Sapiens
ttcattcctattaga

SEQ ID NO: 2577 - DNA, 15 bp, Homo Sapiens
tttcattcctattag

SEQ ID NO: 2578 - DNA, 15 bp, Homo Sapiens
ttttcattcctatta

SEQ ID NO: 2579 - DNA, 15 bp, Homo Sapiens
gttttcattcctatt

SEQ ID NO: 2580 - DNA, 15 bp, Homo Sapiens
tgttttcattcctat

SEQ ID NO: 2581 - DNA, 15 bp, Homo Sapiens
atgttttcattccta

SEQ ID NO: 2582 - DNA, 15 bp, Homo Sapiens
aatgttttcattcct

SEQ ID NO: 2583 - DNA, 15 bp, Homo Sapiens
aaatgttttcattcc

SEQ ID NO: 2584 - DNA, 15 bp, Homo Sapiens
aaaatgttttcattc

SEQ ID NO: 2585 - DNA, 15 bp, Homo Sapiens
taaaatgttttcatt

SEQ ID NO: 2586 - DNA, 15 bp, Homo Sapiens
ctaaaatgttttcat

SEQ ID NO: 2587 - DNA, 15 bp, Homo Sapiens
gctaaaatgttttca

SEQ ID NO: 2588 - DNA, 15 bp, Homo Sapiens
tgctaaaatgttttc

SEQ ID NO: 2589 - DNA, 15 bp, Homo Sapiens
ctgctaaaatgtttt

SEQ ID NO: 2590 - DNA, 15 bp, Homo Sapiens
tctgctaaaatgttt

SEQ ID NO: 2591 - DNA, 15 bp, Homo Sapiens
gtctgctaaaatgtt

SEQ ID NO: 2592 - DNA, 15 bp, Homo Sapiens
agtctgctaaaatgt

SEQ ID NO: 2593 - DNA, 15 bp, Homo Sapiens
aagtctgctaaaatg

SEQ ID NO: 2594 - DNA, 15 bp, Homo Sapiens
aaagtctgctaaaat

SEQ ID NO: 2595 - DNA, 15 bp, Homo Sapiens
aaaagtctgctaaaa

SEQ ID NO: 2596 - DNA, 15 bp, Homo Sapiens
aaaaagtctgctaaa

SEQ ID NO: 2597 - DNA, 15 bp, Homo Sapiens
taaaaagtctgctaa

SEQ ID NO: 2598 - DNA, 15 bp, Homo Sapiens
ttaaaaagtctgcta

SEQ ID NO: 2599 - DNA, 15 bp, Homo Sapiens
cttaaaaagtctgct

SEQ ID NO: 2600 - DNA, 15 bp, Homo Sapiens
gcttaaaaagtctgc

SEQ ID NO: 2601 - DNA, 15 bp, Homo Sapiens
agcttaaaaagtctg

SEQ ID NO: 2602 - DNA, 15 bp, Homo Sapiens
aagcttaaaaagtct

SEQ ID NO: 2603 - DNA, 15 bp, Homo Sapiens
aaagcttaaaaagtc

SEQ ID NO: 2604 - DNA, 15 bp, Homo Sapiens
gaaagcttaaaaagt

SEQ ID NO: 2605 - DNA, 15 bp, Homo Sapiens
agaaagcttaaaaag

SEQ ID NO: 2606 - DNA, 15 bp, Homo Sapiens
aagaaagcttaaaaa

SEQ ID NO: 2607 - DNA, 16 bp, Homo Sapiens
gccctacctctttttt

SEQ ID NO: 2608 - DNA, 16 bp, Homo Sapiens
cgccctacctcttttt

SEQ ID NO: 2609 - DNA, 16 bp, Homo Sapiens
tcgccctacctctttt

SEQ ID NO: 2610 - DNA, 16 bp, Homo Sapiens
gtcgccctacctcttt

SEQ ID NO: 2611 - DNA, 16 bp, Homo Sapiens
tgtcgccctacctctt

SEQ ID NO: 2612 - DNA, 16 bp, Homo Sapiens
ctgtcgccctacctct

SEQ ID NO: 2613 - DNA, 16 bp, Homo Sapiens
tctgtcgccctacctc

SEQ ID NO: 2614 - DNA, 16 bp, Homo Sapiens
atctgtcgccctacct

SEQ ID NO: 2615 - DNA, 16 bp, Homo Sapiens
gatctgtcgccctacc

SEQ ID NO: 2616 - DNA, 16 bp, Homo Sapiens
agatctgtcgccctac

SEQ ID NO: 2617 - DNA, 16 bp, Homo Sapiens
tagatctgtcgcccta

SEQ ID NO: 2618 - DNA, 16 bp, Homo Sapiens
ttagatctgtcgccct

SEQ ID NO: 2619 - DNA, 16 bp, Homo Sapiens
attagatctgtcgccc

SEQ ID NO: 2620 - DNA, 16 bp, Homo Sapiens
tattagatctgtcgcc

SEQ ID NO: 2621 - DNA, 16 bp, Homo Sapiens
ctattagatctgtcgc

SEQ ID NO: 2622 - DNA, 16 bp, Homo Sapiens
cctattagatctgtcg

SEQ ID NO: 2623 - DNA, 16 bp, Homo Sapiens
tcctattagatctgtc

SEQ ID NO: 2624 - DNA, 16 bp, Homo Sapiens
ttcctattagatctgt

SEQ ID NO: 2625 - DNA, 16 bp, Homo Sapiens
attcctattagatctg

SEQ ID NO: 2626 - DNA, 16 bp, Homo Sapiens
cattcctattagatct

SEQ ID NO: 2627 - DNA, 16 bp, Homo Sapiens
tcattcctattagatc

SEQ ID NO: 2628 - DNA, 16 bp, Homo Sapiens
ttcattcctattagat

SEQ ID NO: 2629 - DNA, 16 bp, Homo Sapiens
tttcattcctattaga

SEQ ID NO: 2630 - DNA, 16 bp, Homo Sapiens
ttttcattcctattag

SEQ ID NO: 2631 - DNA, 16 bp, Homo Sapiens
gttttcattcctatta

SEQ ID NO: 2632 - DNA, 16 bp, Homo Sapiens
tgttttcattcctatt

SEQ ID NO: 2633 - DNA, 16 bp, Homo Sapiens
atgttttcattcctat

SEQ ID NO: 2634 - DNA, 16 bp, Homo Sapiens
aatgttttcattccta

SEQ ID NO: 2635 - DNA, 16 bp, Homo Sapiens
aaatgttttcattcct

SEQ ID NO: 2636 - DNA, 16 bp, Homo Sapiens
aaaatgttttcattcc

SEQ ID NO: 2637 - DNA, 16 bp, Homo Sapiens
taaaatgttttcattc

SEQ ID NO: 2638 - DNA, 16 bp, Homo Sapiens
ctaaaatgttttcatt

SEQ ID NO: 2639 - DNA, 16 bp, Homo Sapiens
gctaaaatgttttcat

SEQ ID NO: 2640 - DNA, 16 bp, Homo Sapiens
tgctaaaatgttttca

SEQ ID NO: 2641 - DNA, 16 bp, Homo Sapiens
ctgctaaaatgttttc

SEQ ID NO: 2642 - DNA, 16 bp, Homo Sapiens
tctgctaaaatgtttt

SEQ ID NO: 2643 - DNA, 16 bp, Homo Sapiens
gtctgctaaaatgttt

SEQ ID NO: 2644 - DNA, 16 bp, Homo Sapiens
agtctgctaaaatgtt

SEQ ID NO: 2645 - DNA, 16 bp, Homo Sapiens
aagtctgctaaaatgt

SEQ ID NO: 2646 - DNA, 16 bp, Homo Sapiens
aaagtctgctaaaatg

SEQ ID NO: 2647 - DNA, 16 bp, Homo Sapiens
aaaagtctgctaaaat

SEQ ID NO: 2648 - DNA, 16 bp, Homo Sapiens
aaaaagtctgctaaaa

SEQ ID NO: 2649 - DNA, 16 bp, Homo Sapiens
taaaaagtctgctaaa

SEQ ID NO: 2650 - DNA, 16 bp, Homo Sapiens
ttaaaaagtctgctaa

SEQ ID NO: 2651 - DNA, 16 bp, Homo Sapiens
cttaaaaagtctgcta

SEQ ID NO: 2652 - DNA, 16 bp, Homo Sapiens
gcttaaaaagtctgct

SEQ ID NO: 2653 - DNA, 16 bp, Homo Sapiens
agcttaaaaagtctgc

SEQ ID NO: 2654 - DNA, 16 bp, Homo Sapiens
aagcttaaaaagtctg

SEQ ID NO: 2655 - DNA, 16 bp, Homo Sapiens
aaagcttaaaaagtct

SEQ ID NO: 2656 - DNA, 16 bp, Homo Sapiens
gaaagcttaaaaagtc

SEQ ID NO: 2657 - DNA, 16 bp, Homo Sapiens
agaaagcttaaaaagt

SEQ ID NO: 2658 - DNA, 16 bp, Homo Sapiens
aagaaagcttaaaaag

SEQ ID NO: 2659 - DNA, 16 bp, Homo Sapiens
aaagaaagcttaaaaa

SEQ ID NO: 2660 - DNA, 17 bp, Homo Sapiens
gccctacctcttttttc

SEQ ID NO: 2661 - DNA, 17 bp, Homo Sapiens
cgccctacctctttttt

SEQ ID NO: 2662 - DNA, 17 bp, Homo Sapiens
tcgccctacctcttttt

SEQ ID NO: 2663 - DNA, 17 bp, Homo Sapiens
gtcgccctacctctttt

SEQ ID NO: 2664 - DNA, 17 bp, Homo Sapiens
tgtcgccctacctcttt

SEQ ID NO: 2665 - DNA, 17 bp, Homo Sapiens
ctgtcgccctacctctt

SEQ ID NO: 2666 - DNA, 17 bp, Homo Sapiens
tctgtcgccctacctct

SEQ ID NO: 2667 - DNA, 17 bp, Homo Sapiens
atctgtcgccctacctc

SEQ ID NO: 2668 - DNA, 17 bp, Homo Sapiens
gatctgtcgccctacct

SEQ ID NO: 2669 - DNA, 17 bp, Homo Sapiens
agatctgtcgccctacc

SEQ ID NO: 2670 - DNA, 17 bp, Homo Sapiens
tagatctgtcgccctac

SEQ ID NO: 2671 - DNA, 17 bp, Homo Sapiens
ttagatctgtcgcccta

SEQ ID NO: 2672 - DNA, 17 bp, Homo Sapiens
attagatctgtcgccct

SEQ ID NO: 2673 - DNA, 17 bp, Homo Sapiens
tattagatctgtcgccc

SEQ ID NO: 2674 - DNA, 17 bp, Homo Sapiens
ctattagatctgtcgcc

SEQ ID NO: 2675 - DNA, 17 bp, Homo Sapiens
cctattagatctgtcgc

SEQ ID NO: 2676 - DNA, 17 bp, Homo Sapiens
tcctattagatctgtcg

SEQ ID NO: 2677 - DNA, 17 bp, Homo Sapiens
ttcctattagatctgtc

SEQ ID NO: 2678 - DNA, 17 bp, Homo Sapiens
attcctattagatctgt

SEQ ID NO: 2679 - DNA, 17 bp, Homo Sapiens
cattcctattagatctg

SEQ ID NO: 2680 - DNA, 17 bp, Homo Sapiens
tcattcctattagatct

SEQ ID NO: 2681 - DNA, 17 bp, Homo Sapiens
ttcattcctattagatc

SEQ ID NO: 2682 - DNA, 17 bp, Homo Sapiens
tttcattcctattagat

SEQ ID NO: 2683 - DNA, 17 bp, Homo Sapiens
ttttcattcctattaga

SEQ ID NO: 2684 - DNA, 17 bp, Homo Sapiens
gttttcattcctattag

SEQ ID NO: 2685 - DNA, 17 bp, Homo Sapiens
tgttttcattcctatta

SEQ ID NO: 2686 - DNA, 17 bp, Homo Sapiens
atgttttcattcctatt

SEQ ID NO: 2687 - DNA, 17 bp, Homo Sapiens
aatgttttcattcctat

SEQ ID NO: 2688 - DNA, 17 bp, Homo Sapiens
aaatgttttcattccta

SEQ ID NO: 2689 - DNA, 17 bp, Homo Sapiens
aaaatgttttcattcct

SEQ ID NO: 2690 - DNA, 17 bp, Homo Sapiens
taaaatgttttcattcc

SEQ ID NO: 2691 - DNA, 17 bp, Homo Sapiens
ctaaaatgttttcattc

SEQ ID NO: 2692 - DNA, 17 bp, Homo Sapiens
gctaaaatgttttcatt

SEQ ID NO: 2693 - DNA, 17 bp, Homo Sapiens
tgctaaaatgttttcat

SEQ ID NO: 2694 - DNA, 17 bp, Homo Sapiens
ctgctaaaatgttttca

SEQ ID NO: 2695 - DNA, 17 bp, Homo Sapiens
tctgctaaaatgttttc

SEQ ID NO: 2696 - DNA, 17 bp, Homo Sapiens
gtctgctaaaatgtttt

SEQ ID NO: 2697 - DNA, 17 bp, Homo Sapiens
agtctgctaaaatgttt

SEQ ID NO: 2698 - DNA, 17 bp, Homo Sapiens
aagtctgctaaaatgtt

SEQ ID NO: 2699 - DNA, 17 bp, Homo Sapiens
aaagtctgctaaaatgt

SEQ ID NO: 2700 - DNA, 17 bp, Homo Sapiens
aaaagtctgctaaaatg

SEQ ID NO: 2701 - DNA, 17 bp, Homo Sapiens
aaaaagtctgctaaaat

SEQ ID NO: 2702 - DNA, 17 bp, Homo Sapiens
taaaaagtctgctaaaa

SEQ ID NO: 2703 - DNA, 17 bp, Homo Sapiens
ttaaaaagtctgctaaa

SEQ ID NO: 2704 - DNA, 17 bp, Homo Sapiens
cttaaaaagtctgctaa

SEQ ID NO: 2705 - DNA, 17 bp, Homo Sapiens
gcttaaaaagtctgcta

SEQ ID NO: 2706 - DNA, 17 bp, Homo Sapiens
agcttaaaaagtctgct

SEQ ID NO: 2707 - DNA, 17 bp, Homo Sapiens
aagcttaaaaagtctgc

SEQ ID NO: 2708 - DNA, 17 bp, Homo Sapiens
aaagcttaaaaagtctg

SEQ ID NO: 2709 - DNA, 17 bp, Homo Sapiens
gaaagcttaaaaagtct

SEQ ID NO: 2710 - DNA, 17 bp, Homo Sapiens
agaaagcttaaaaagtc

SEQ ID NO: 2711 - DNA, 17 bp, Homo Sapiens
aagaaagcttaaaaagt

SEQ ID NO: 2712 - DNA, 17 bp, Homo Sapiens
aaagaaagcttaaaaag

SEQ ID NO: 2713 - DNA, 17 bp, Homo Sapiens
taaagaaagcttaaaaa

SEQ ID NO: 2714 - DNA, 18 bp, Homo Sapiens
gccctacctcttttttct

SEQ ID NO: 2715 - DNA, 18 bp, Homo Sapiens
cgccctacctcttttttc

SEQ ID NO: 2716 - DNA, 18 bp, Homo Sapiens
tcgccctacctctttttt

SEQ ID NO: 2717 - DNA, 18 bp, Homo Sapiens
gtcgccctacctcttttt

SEQ ID NO: 2718 - DNA, 18 bp, Homo Sapiens
tgtcgccctacctctttt

SEQ ID NO: 2719 - DNA, 18 bp, Homo Sapiens
ctgtcgccctacctcttt

SEQ ID NO: 2720 - DNA, 18 bp, Homo Sapiens
tctgtcgccctacctctt

SEQ ID NO: 2721 - DNA, 18 bp, Homo Sapiens
atctgtcgccctacctct

SEQ ID NO: 2722 - DNA, 18 bp, Homo Sapiens
gatctgtcgccctacctc

SEQ ID NO: 2723 - DNA, 18 bp, Homo Sapiens
agatctgtcgccctacct

SEQ ID NO: 2724 - DNA, 18 bp, Homo Sapiens
tagatctgtcgccctacc

SEQ ID NO: 2725 - DNA, 18 bp, Homo Sapiens
ttagatctgtcgccctac

SEQ ID NO: 2726 - DNA, 18 bp, Homo Sapiens
attagatctgtcgcccta

SEQ ID NO: 2727 - DNA, 18 bp, Homo Sapiens
tattagatctgtcgccct

SEQ ID NO: 2728 - DNA, 18 bp, Homo Sapiens
ctattagatctgtcgccc

SEQ ID NO: 2729 - DNA, 18 bp, Homo Sapiens
cctattagatctgtcgcc

SEQ ID NO: 2730 - DNA, 18 bp, Homo Sapiens
tcctattagatctgtcgc

SEQ ID NO: 2731 - DNA, 18 bp, Homo Sapiens
ttcctattagatctgtcg

SEQ ID NO: 2732 - DNA, 18 bp, Homo Sapiens
attcctattagatctgtc

SEQ ID NO: 2733 - DNA, 18 bp, Homo Sapiens
cattcctattagatctgt

SEQ ID NO: 2734 - DNA, 18 bp, Homo Sapiens
tcattcctattagatctg

SEQ ID NO: 2735 - DNA, 18 bp, Homo Sapiens
ttcattcctattagatct

SEQ ID NO: 2736 - DNA, 18 bp, Homo Sapiens
tttcattcctattagatc

SEQ ID NO: 2737 - DNA, 18 bp, Homo Sapiens
ttttcattcctattagat

SEQ ID NO: 2738 - DNA, 18 bp, Homo Sapiens
gttttcattcctattaga

SEQ ID NO: 2739 - DNA, 18 bp, Homo Sapiens
tgttttcattcctattag

SEQ ID NO: 2740 - DNA, 18 bp, Homo Sapiens
atgttttcattcctatta

SEQ ID NO: 2741 - DNA, 18 bp, Homo Sapiens
aatgttttcattcctatt

SEQ ID NO: 2742 - DNA, 18 bp, Homo Sapiens
aaatgttttcattcctat

SEQ ID NO: 2743 - DNA, 18 bp, Homo Sapiens
aaaatgttttcattccta

SEQ ID NO: 2744 - DNA, 18 bp, Homo Sapiens
taaaatgttttcattcct

SEQ ID NO: 2745 - DNA, 18 bp, Homo Sapiens
ctaaaatgttttcattcc

SEQ ID NO: 2746 - DNA, 18 bp, Homo Sapiens
gctaaaatgttttcattc

SEQ ID NO: 2747 - DNA, 18 bp, Homo Sapiens
tgctaaaatgttttcatt

SEQ ID NO: 2748 - DNA, 18 bp, Homo Sapiens
ctgctaaaatgttttcat

SEQ ID NO: 2749 - DNA, 18 bp, Homo Sapiens
tctgctaaaatgttttca

SEQ ID NO: 2750 - DNA, 18 bp, Homo Sapiens
gtctgctaaaatgttttc

SEQ ID NO: 2751 - DNA, 18 bp, Homo Sapiens
agtctgctaaaatgtttt

SEQ ID NO: 2752 - DNA, 18 bp, Homo Sapiens
aagtctgctaaaatgttt

SEQ ID NO: 2753 - DNA, 18 bp, Homo Sapiens
aaagtctgctaaaatgtt

SEQ ID NO: 2754 - DNA, 18 bp, Homo Sapiens
aaaagtctgctaaaatgt

SEQ ID NO: 2755 - DNA, 18 bp, Homo Sapiens
aaaaagtctgctaaaatg

SEQ ID NO: 2756 - DNA, 18 bp, Homo Sapiens
taaaaagtctgctaaaat

SEQ ID NO: 2757 - DNA, 18 bp, Homo Sapiens
ttaaaaagtctgctaaaa

SEQ ID NO: 2758 - DNA, 18 bp, Homo Sapiens
cttaaaaagtctgctaaa

SEQ ID NO: 2759 - DNA, 18 bp, Homo Sapiens
gcttaaaaagtctgctaa

SEQ ID NO: 2760 - DNA, 18 bp, Homo Sapiens
agcttaaaaagtctgcta

SEQ ID NO: 2761 - DNA, 18 bp, Homo Sapiens
aagcttaaaaagtctgct

SEQ ID NO: 2762 - DNA, 18 bp, Homo Sapiens
aaagcttaaaaagtctgc

SEQ ID NO: 2763 - DNA, 18 bp, Homo Sapiens
gaaagcttaaaaagtctg

SEQ ID NO: 2764 - DNA, 18 bp, Homo Sapiens
agaaagcttaaaaagtct

SEQ ID NO: 2765 - DNA, 18 bp, Homo Sapiens
aagaaagcttaaaaagtc

SEQ ID NO: 2766 - DNA, 18 bp, Homo Sapiens
aaagaaagcttaaaaagt

SEQ ID NO: 2767 - DNA, 18 bp, Homo Sapiens
taaagaaagcttaaaaag

SEQ ID NO: 2768 - DNA, 18 bp, Homo Sapiens
ctaaagaaagcttaaaaa

SEQ ID NO: 2769 - DNA, 19 bp, Homo Sapiens
gccctacctcttttttctg

SEQ ID NO: 2770 - DNA, 19 bp, Homo Sapiens
cgccctacctcttttttct

SEQ ID NO: 2771 - DNA, 19 bp, Homo Sapiens
tcgccctacctcttttttc

SEQ ID NO: 2772 - DNA, 19 bp, Homo Sapiens
gtcgccctacctctttttt

SEQ ID NO: 2773 - DNA, 19 bp, Homo Sapiens
tgtcgccctacctcttttt

SEQ ID NO: 2774 - DNA, 19 bp, Homo Sapiens
ctgtcgccctacctctttt

SEQ ID NO: 2775 - DNA, 19 bp, Homo Sapiens
tctgtcgccctacctcttt

SEQ ID NO: 2776 - DNA, 19 bp, Homo Sapiens
atctgtcgccctacctctt

SEQ ID NO: 2777 - DNA, 19 bp, Homo Sapiens
gatctgtcgccctacctct

SEQ ID NO: 2778 - DNA, 19 bp, Homo Sapiens
agatctgtcgccctacctc

SEQ ID NO: 2779 - DNA, 19 bp, Homo Sapiens
tagatctgtcgccctacct

SEQ ID NO: 2780 - DNA, 19 bp, Homo Sapiens
ttagatctgtcgccctacc

SEQ ID NO: 2781 - DNA, 19 bp, Homo Sapiens
attagatctgtcgccctac

SEQ ID NO: 2782 - DNA, 19 bp, Homo Sapiens
tattagatctgtcgcccta

SEQ ID NO: 2783 - DNA, 19 bp, Homo Sapiens
ctattagatctgtcgccct

SEQ ID NO: 2784 - DNA, 19 bp, Homo Sapiens
cctattagatctgtcgccc

SEQ ID NO: 2785 - DNA, 19 bp, Homo Sapiens
tcctattagatctgtcgcc

SEQ ID NO: 2786 - DNA, 19 bp, Homo Sapiens
ttcctattagatctgtcgc

SEQ ID NO: 2787 - DNA, 19 bp, Homo Sapiens
attcctattagatctgtcg

SEQ ID NO: 2788 - DNA, 19 bp, Homo Sapiens
cattcctattagatctgtc

SEQ ID NO: 2789 - DNA, 19 bp, Homo Sapiens
tcattcctattagatctgt

SEQ ID NO: 2790 - DNA, 19 bp, Homo Sapiens
ttcattcctattagatctg

SEQ ID NO: 2791 - DNA, 19 bp, Homo Sapiens
tttcattcctattagatct

SEQ ID NO: 2792 - DNA, 19 bp, Homo Sapiens
ttttcattcctattagatc

SEQ ID NO: 2793 - DNA, 19 bp, Homo Sapiens
gttttcattcctattagat

SEQ ID NO: 2794 - DNA, 19 bp, Homo Sapiens
tgttttcattcctattaga

SEQ ID NO: 2795 - DNA, 19 bp, Homo Sapiens
atgttttcattcctattag

SEQ ID NO: 2796 - DNA, 19 bp, Homo Sapiens
aatgttttcattcctatta

SEQ ID NO: 2797 - DNA, 19 bp, Homo Sapiens
aaatgttttcattcctatt

SEQ ID NO: 2798 - DNA, 19 bp, Homo Sapiens
aaaatgttttcattcctat

SEQ ID NO: 2799 - DNA, 19 bp, Homo Sapiens
taaaatgttttcattccta

SEQ ID NO: 2800 - DNA, 19 bp, Homo Sapiens
ctaaaatgttttcattcct

SEQ ID NO: 2801 - DNA, 19 bp, Homo Sapiens
gctaaaatgttttcattcc

SEQ ID NO: 2802 - DNA, 19 bp, Homo Sapiens
tgctaaaatgttttcattc

SEQ ID NO: 2803 - DNA, 19 bp, Homo Sapiens
ctgctaaaatgttttcatt

SEQ ID NO: 2804 - DNA, 19 bp, Homo Sapiens
tctgctaaaatgttttcat

SEQ ID NO: 2805 - DNA, 19 bp, Homo Sapiens
gtctgctaaaatgttttca

SEQ ID NO: 2806 - DNA, 19 bp, Homo Sapiens
agtctgctaaaatgttttc

SEQ ID NO: 2807 - DNA, 19 bp, Homo Sapiens
aagtctgctaaaatgtttt

SEQ ID NO: 2808 - DNA, 19 bp, Homo Sapiens
aaagtctgctaaaatgttt

SEQ ID NO: 2809 - DNA, 19 bp, Homo Sapiens
aaaagtctgctaaaatgtt

SEQ ID NO: 2810 - DNA, 19 bp, Homo Sapiens
aaaaagtctgctaaaatgt

SEQ ID NO: 2811 - DNA, 19 bp, Homo Sapiens
taaaaagtctgctaaaatg

SEQ ID NO: 2812 - DNA, 19 bp, Homo Sapiens
ttaaaaagtctgctaaaat

SEQ ID NO: 2813 - DNA, 19 bp, Homo Sapiens
cttaaaaagtctgctaaaa

SEQ ID NO: 2814 - DNA, 19 bp, Homo Sapiens
gcttaaaaagtctgctaaa

SEQ ID NO: 2815 - DNA, 19 bp, Homo Sapiens
agcttaaaaagtctgctaa

SEQ ID NO: 2816 - DNA, 19 bp, Homo Sapiens
aagcttaaaaagtctgcta

SEQ ID NO: 2817 - DNA, 19 bp, Homo Sapiens
aaagcttaaaaagtctgct

SEQ ID NO: 2818 - DNA, 19 bp, Homo Sapiens
gaaagcttaaaaagtctgc

SEQ ID NO: 2819 - DNA, 19 bp, Homo Sapiens
agaaagcttaaaaagtctg

SEQ ID NO: 2820 - DNA, 19 bp, Homo Sapiens
aagaaagcttaaaaagtct

SEQ ID NO: 2821 - DNA, 19 bp, Homo Sapiens
aaagaaagcttaaaaagtc

SEQ ID NO: 2822 - DNA, 19 bp, Homo Sapiens
taaagaaagcttaaaaagt

SEQ ID NO: 2823 - DNA, 19 bp, Homo Sapiens
ctaaagaaagcttaaaaag

SEQ ID NO: 2824 - DNA, 19 bp, Homo Sapiens
tctaaagaaagcttaaaaa

SEQ ID NO: 2825 - DNA, 20 bp, Homo Sapiens
gccctacctcttttttctgt

SEQ ID NO: 2826 - DNA, 20 bp, Homo Sapiens
cgccctacctcttttttctg

SEQ ID NO: 2827 - DNA, 20 bp, Homo Sapiens
tcgccctacctcttttttct

SEQ ID NO: 2828 - DNA, 20 bp, Homo Sapiens
gtcgccctacctcttttttc

SEQ ID NO: 2829 - DNA, 20 bp, Homo Sapiens
tgtcgccctacctctttttt

SEQ ID NO: 2830 - DNA, 20 bp, Homo Sapiens
ctgtcgccctacctcttttt

SEQ ID NO: 2831 - DNA, 20 bp, Homo Sapiens
tctgtcgccctacctctttt

SEQ ID NO: 2832 - DNA, 20 bp, Homo Sapiens
atctgtcgccctacctcttt

SEQ ID NO: 2833 - DNA, 20 bp, Homo Sapiens
gatctgtcgccctacctctt

SEQ ID NO: 2834 - DNA, 20 bp, Homo Sapiens
agatctgtcgccctacctct

SEQ ID NO: 2835 - DNA, 20 bp, Homo Sapiens
tagatctgtcgccctacctc

SEQ ID NO: 2836 - DNA, 20 bp, Homo Sapiens
ttagatctgtcgccctacct

SEQ ID NO: 2837 - DNA, 20 bp, Homo Sapiens
attagatctgtcgccctacc

SEQ ID NO: 2838 - DNA, 20 bp, Homo Sapiens
tattagatctgtcgccctac

SEQ ID NO: 2839 - DNA, 20 bp, Homo Sapiens
ctattagatctgtcgcccta

SEQ ID NO: 2840 - DNA, 20 bp, Homo Sapiens
cctattagatctgtcgccct

SEQ ID NO: 2841 - DNA, 20 bp, Homo Sapiens
tcctattagatctgtcgccc

SEQ ID NO: 2842 - DNA, 20 bp, Homo Sapiens
ttcctattagatctgtcgcc

SEQ ID NO: 2843 - DNA, 20 bp, Homo Sapiens
attcctattagatctgtcgc

SEQ ID NO: 2844 - DNA, 20 bp, Homo Sapiens
cattcctattagatctgtcg

SEQ ID NO: 2845 - DNA, 20 bp, Homo Sapiens
tcattcctattagatctgtc

SEQ ID NO: 2846 - DNA, 20 bp, Homo Sapiens
ttcattcctattagatctgt

SEQ ID NO: 2847 - DNA, 20 bp, Homo Sapiens
tttcattcctattagatctg

SEQ ID NO: 2848 - DNA, 20 bp, Homo Sapiens
ttttcattcctattagatct

SEQ ID NO: 2849 - DNA, 20 bp, Homo Sapiens
gttttcattcctattagatc

SEQ ID NO: 2850 - DNA, 20 bp, Homo Sapiens
tgttttcattcctattagat

SEQ ID NO: 2851 - DNA, 20 bp, Homo Sapiens
atgttttcattcctattaga

SEQ ID NO: 2852 - DNA, 20 bp, Homo Sapiens
aatgttttcattcctattag

SEQ ID NO: 2853 - DNA, 20 bp, Homo Sapiens
aaatgttttcattcctatta

SEQ ID NO: 2854 - DNA, 20 bp, Homo Sapiens
aaaatgttttcattcctatt

SEQ ID NO: 2855 - DNA, 20 bp, Homo Sapiens
taaaatgttttcattcctat

SEQ ID NO: 2856 - DNA, 20 bp, Homo Sapiens
ctaaaatgttttcattccta

SEQ ID NO: 2857 - DNA, 20 bp, Homo Sapiens
gctaaaatgttttcattcct

SEQ ID NO: 2858 - DNA, 20 bp, Homo Sapiens
tgctaaaatgttttcattcc

SEQ ID NO: 2859 - DNA, 20 bp, Homo Sapiens
ctgctaaaatgttttcattc

SEQ ID NO: 2860 - DNA, 20 bp, Homo Sapiens
tctgctaaaatgttttcatt

SEQ ID NO: 2861 - DNA, 20 bp, Homo Sapiens
gtctgctaaaatgttttcat

SEQ ID NO: 2862 - DNA, 20 bp, Homo Sapiens
agtctgctaaaatgttttca

SEQ ID NO: 2863 - DNA, 20 bp, Homo Sapiens
aagtctgctaaaatgttttc

SEQ ID NO: 2864 - DNA, 20 bp, Homo Sapiens
aaagtctgctaaaatgtttt

SEQ ID NO: 2865 - DNA, 20 bp, Homo Sapiens
aaaagtctgctaaaatgttt

SEQ ID NO: 2866 - DNA, 20 bp, Homo Sapiens
aaaaagtctgctaaaatgtt

SEQ ID NO: 2867 - DNA, 20 bp, Homo Sapiens
taaaaagtctgctaaaatgt

SEQ ID NO: 2868 - DNA, 20 bp, Homo Sapiens
ttaaaaagtctgctaaaatg

SEQ ID NO: 2869 - DNA, 20 bp, Homo Sapiens
cttaaaaagtctgctaaaat

SEQ ID NO: 2870 - DNA, 20 bp, Homo Sapiens
gcttaaaaagtctgctaaaa

SEQ ID NO: 2871 - DNA, 20 bp, Homo Sapiens
agcttaaaaagtctgctaaa

SEQ ID NO: 2872 - DNA, 20 bp, Homo Sapiens
aagcttaaaaagtctgctaa

SEQ ID NO: 2873 - DNA, 20 bp, Homo Sapiens
aaagcttaaaaagtctgcta

SEQ ID NO: 2874 - DNA, 20 bp, Homo Sapiens
gaaagcttaaaaagtctgct

SEQ ID NO: 2875 - DNA, 20 bp, Homo Sapiens
agaaagcttaaaaagtctgc

SEQ ID NO: 2876 - DNA, 20 bp, Homo Sapiens
aagaaagcttaaaaagtctg

SEQ ID NO: 2877 - DNA, 20 bp, Homo Sapiens
aaagaaagcttaaaaagtct

SEQ ID NO: 2878 - DNA, 20 bp, Homo Sapiens
taaagaaagcttaaaaagtc

SEQ ID NO: 2879 - DNA, 20 bp, Homo Sapiens
ctaaagaaagcttaaaaagt

SEQ ID NO: 2880 - DNA, 20 bp, Homo Sapiens
tctaaagaaagcttaaaaag

SEQ ID NO: 2881 - DNA, 20 bp, Homo Sapiens
ttctaaagaaagcttaaaaa

SEQ ID NO: 2882 - DNA, 21 bp, Homo Sapiens
gccctacctcttttttctgtc

SEQ ID NO: 2883 - DNA, 21 bp, Homo Sapiens
cgccctacctcttttttctgt

SEQ ID NO: 2884 - DNA, 21 bp, Homo Sapiens
tcgccctacctcttttttctg

SEQ ID NO: 2885 - DNA, 21 bp, Homo Sapiens
gtcgccctacctcttttttct

SEQ ID NO: 2886 - DNA, 21 bp, Homo Sapiens
tgtcgccctacctcttttttc

SEQ ID NO: 2887 - DNA, 21 bp, Homo Sapiens
ctgtcgccctacctctttttt

SEQ ID NO: 2888 - DNA, 21 bp, Homo Sapiens
tctgtcgccctacctcttttt

SEQ ID NO: 2889 - DNA, 21 bp, Homo Sapiens
atctgtcgccctacctctttt

SEQ ID NO: 2890 - DNA, 21 bp, Homo Sapiens
gatctgtcgccctacctcttt

SEQ ID NO: 2891 - DNA, 21 bp, Homo Sapiens
agatctgtcgccctacctctt

SEQ ID NO: 2892 - DNA, 21 bp, Homo Sapiens
tagatctgtcgccctacctct

SEQ ID NO: 2893 - DNA, 21 bp, Homo Sapiens
ttagatctgtcgccctacctc

SEQ ID NO: 2894 - DNA, 21 bp, Homo Sapiens
attagatctgtcgccctacct

SEQ ID NO: 2895 - DNA, 21 bp, Homo Sapiens
tattagatctgtcgccctacc

SEQ ID NO: 2896 - DNA, 21 bp, Homo Sapiens
ctattagatctgtcgccctac

SEQ ID NO: 2897 - DNA, 21 bp, Homo Sapiens
cctattagatctgtcgcccta

SEQ ID NO: 2898 - DNA, 21 bp, Homo Sapiens
tcctattagatctgtcgccct

SEQ ID NO: 2899 - DNA, 21 bp, Homo Sapiens
ttcctattagatctgtcgccc

SEQ ID NO: 2900 - DNA, 21 bp, Homo Sapiens
attcctattagatctgtcgcc

SEQ ID NO: 2901 - DNA, 21 bp, Homo Sapiens
cattcctattagatctgtcgc

SEQ ID NO: 2902 - DNA, 21 bp, Homo Sapiens
tcattcctattagatctgtcg

SEQ ID NO: 2903 - DNA, 21 bp, Homo Sapiens
ttcattcctattagatctgtc

SEQ ID NO: 2904 - DNA, 21 bp, Homo Sapiens
tttcattcctattagatctgt

SEQ ID NO: 2905 - DNA, 21 bp, Homo Sapiens
ttttcattcctattagatctg

SEQ ID NO: 2906 - DNA, 21 bp, Homo Sapiens
gttttcattcctattagatct

SEQ ID NO: 2907 - DNA, 21 bp, Homo Sapiens
tgttttcattcctattagatc

SEQ ID NO: 2908 - DNA, 21 bp, Homo Sapiens
atgttttcattcctattagat

SEQ ID NO: 2909 - DNA, 21 bp, Homo Sapiens
aatgttttcattcctattaga

SEQ ID NO: 2910 - DNA, 21 bp, Homo Sapiens
aaatgttttcattcctattag

SEQ ID NO: 2911 - DNA, 21 bp, Homo Sapiens
aaaatgttttcattcctatta

SEQ ID NO: 2912 - DNA, 21 bp, Homo Sapiens
taaaatgttttcattcctatt

SEQ ID NO: 2913 - DNA, 21 bp, Homo Sapiens
ctaaaatgttttcattcctat

SEQ ID NO: 2914 - DNA, 21 bp, Homo Sapiens
gctaaaatgttttcattccta

SEQ ID NO: 2915 - DNA, 21 bp, Homo Sapiens
tgctaaaatgttttcattcct

SEQ ID NO: 2916 - DNA, 21 bp, Homo Sapiens
ctgctaaaatgttttcattcc

SEQ ID NO: 2917 - DNA, 21 bp, Homo Sapiens
tctgctaaaatgttttcattc

SEQ ID NO: 2918 - DNA, 21 bp, Homo Sapiens
gtctgctaaaatgttttcatt

SEQ ID NO: 2919 - DNA, 21 bp, Homo Sapiens
agtctgctaaaatgttttcat

SEQ ID NO: 2920 - DNA, 21 bp, Homo Sapiens
aagtctgctaaaatgttttca

SEQ ID NO: 2921 - DNA, 21 bp, Homo Sapiens
aaagtctgctaaaatgttttc

SEQ ID NO: 2922 - DNA, 21 bp, Homo Sapiens
aaaagtctgctaaaatgtttt

SEQ ID NO: 2923 - DNA, 21 bp, Homo Sapiens
aaaaagtctgctaaaatgttt

SEQ ID NO: 2924 - DNA, 21 bp, Homo Sapiens
taaaaagtctgctaaaatgtt

SEQ ID NO: 2925 - DNA, 21 bp, Homo Sapiens
ttaaaaagtctgctaaaatgt

SEQ ID NO: 2926 - DNA, 21 bp, Homo Sapiens
cttaaaaagtctgctaaaatg

SEQ ID NO: 2927 - DNA, 21 bp, Homo Sapiens
gcttaaaaagtctgctaaaat

SEQ ID NO: 2928 - DNA, 21 bp, Homo Sapiens
agcttaaaaagtctgctaaaa

SEQ ID NO: 2929 - DNA, 21 bp, Homo Sapiens
aagcttaaaaagtctgctaaa

SEQ ID NO: 2930 - DNA, 21 bp, Homo Sapiens
aaagcttaaaaagtctgctaa

SEQ ID NO: 2931 - DNA, 21 bp, Homo Sapiens
gaaagcttaaaaagtctgcta

SEQ ID NO: 2932 - DNA, 21 bp, Homo Sapiens
agaaagcttaaaaagtctgct

SEQ ID NO: 2933 - DNA, 21 bp, Homo Sapiens
aagaaagcttaaaaagtctgc

SEQ ID NO: 2934 - DNA, 21 bp, Homo Sapiens
aaagaaagcttaaaaagtctg

SEQ ID NO: 2935 - DNA, 21 bp, Homo Sapiens
taaagaaagcttaaaaagtct

SEQ ID NO: 2936 - DNA, 21 bp, Homo Sapiens
ctaaagaaagcttaaaaagtc

SEQ ID NO: 2937 - DNA, 21 bp, Homo Sapiens
tctaaagaaagcttaaaaagt

SEQ ID NO: 2938 - DNA, 21 bp, Homo Sapiens
ttctaaagaaagcttaaaaag

SEQ ID NO: 2939 - DNA, 21 bp, Homo Sapiens
cttctaaagaaagcttaaaaa

SEQ ID NO: 2940 - DNA, 22 bp, Homo Sapiens
gccctacctcttttttctgtct

SEQ ID NO: 2941 - DNA, 22 bp, Homo Sapiens
cgccctacctcttttttctgtc

SEQ ID NO: 2942 - DNA, 22 bp, Homo Sapiens
tcgccctacctcttttttctgt

SEQ ID NO: 2943 - DNA, 22 bp, Homo Sapiens
gtcgccctacctcttttttctg

SEQ ID NO: 2944 - DNA, 22 bp, Homo Sapiens
tgtcgccctacctcttttttct

SEQ ID NO: 2945 - DNA, 22 bp, Homo Sapiens
ctgtcgccctacctcttttttc

SEQ ID NO: 2946 - DNA, 22 bp, Homo Sapiens
tctgtcgccctacctctttttt

SEQ ID NO: 2947 - DNA, 22 bp, Homo Sapiens
atctgtcgccctacctcttttt

SEQ ID NO: 2948 - DNA, 22 bp, Homo Sapiens
gatctgtcgccctacctctttt

SEQ ID NO: 2949 - DNA, 22 bp, Homo Sapiens
agatctgtcgccctacctcttt

SEQ ID NO: 2950 - DNA, 22 bp, Homo Sapiens
tagatctgtcgccctacctctt

SEQ ID NO: 2951 - DNA, 22 bp, Homo Sapiens
ttagatctgtcgccctacctct

SEQ ID NO: 2952 - DNA, 22 bp, Homo Sapiens
attagatctgtcgccctacctc

SEQ ID NO: 2953 - DNA, 22 bp, Homo Sapiens
tattagatctgtcgccctacct

SEQ ID NO: 2954 - DNA, 22 bp, Homo Sapiens
ctattagatctgtcgccctacc

SEQ ID NO: 2955 - DNA, 22 bp, Homo Sapiens
cctattagatctgtcgccctac

SEQ ID NO: 2956 - DNA, 22 bp, Homo Sapiens
tcctattagatctgtcgcccta

SEQ ID NO: 2957 - DNA, 22 bp, Homo Sapiens
ttcctattagatctgtcgccct

SEQ ID NO: 2958 - DNA, 22 bp, Homo Sapiens
attcctattagatctgtcgccc

SEQ ID NO: 2959 - DNA, 22 bp, Homo Sapiens
cattcctattagatctgtcgcc

SEQ ID NO: 2960 - DNA, 22 bp, Homo Sapiens
tcattcctattagatctgtcgc

SEQ ID NO: 2961 - DNA, 22 bp, Homo Sapiens
ttcattcctattagatctgtcg

SEQ ID NO: 2962 - DNA, 22 bp, Homo Sapiens
tttcattcctattagatctgtc

SEQ ID NO: 2963 - DNA, 22 bp, Homo Sapiens
ttttcattcctattagatctgt

SEQ ID NO: 2964 - DNA, 22 bp, Homo Sapiens
gttttcattcctattagatctg

SEQ ID NO: 2965 - DNA, 22 bp, Homo Sapiens
tgttttcattcctattagatct

SEQ ID NO: 2966 - DNA, 22 bp, Homo Sapiens
atgttttcattcctattagatc

SEQ ID NO: 2967 - DNA, 22 bp, Homo Sapiens
aatgttttcattcctattagat

SEQ ID NO: 2968 - DNA, 22 bp, Homo Sapiens
aaatgttttcattcctattaga

SEQ ID NO: 2969 - DNA, 22 bp, Homo Sapiens
aaaatgttttcattcctattag

SEQ ID NO: 2970 - DNA, 22 bp, Homo Sapiens
taaaatgttttcattcctatta

SEQ ID NO: 2971 - DNA, 22 bp, Homo Sapiens
ctaaaatgttttcattcctatt

SEQ ID NO: 2972 - DNA, 22 bp, Homo Sapiens
gctaaaatgttttcattcctat

SEQ ID NO: 2973 - DNA, 22 bp, Homo Sapiens
tgctaaaatgttttcattccta

SEQ ID NO: 2974 - DNA, 22 bp, Homo Sapiens
ctgctaaaatgttttcattcct

SEQ ID NO: 2975 - DNA, 22 bp, Homo Sapiens
tctgctaaaatgttttcattcc

SEQ ID NO: 2976 - DNA, 22 bp, Homo Sapiens
gtctgctaaaatgttttcattc

SEQ ID NO: 2977 - DNA, 22 bp, Homo Sapiens
agtctgctaaaatgttttcatt

SEQ ID NO: 2978 - DNA, 22 bp, Homo Sapiens
aagtctgctaaaatgttttcat

SEQ ID NO: 2979 - DNA, 22 bp, Homo Sapiens
aaagtctgctaaaatgttttca

SEQ ID NO: 2980 - DNA, 22 bp, Homo Sapiens
aaaagtctgctaaaatgttttc

SEQ ID NO: 2981 - DNA, 22 bp, Homo Sapiens
aaaaagtctgctaaaatgtttt

SEQ ID NO: 2982 - DNA, 22 bp, Homo Sapiens
taaaaagtctgctaaaatgttt

SEQ ID NO: 2983 - DNA, 22 bp, Homo Sapiens
ttaaaaagtctgctaaaatgtt

SEQ ID NO: 2984 - DNA, 22 bp, Homo Sapiens
cttaaaaagtctgctaaaatgt

SEQ ID NO: 2985 - DNA, 22 bp, Homo Sapiens
gcttaaaaagtctgctaaaatg

SEQ ID NO: 2986 - DNA, 22 bp, Homo Sapiens
agcttaaaaagtctgctaaaat

SEQ ID NO: 2987 - DNA, 22 bp, Homo Sapiens
aagcttaaaaagtctgctaaaa

SEQ ID NO: 2988 - DNA, 22 bp, Homo Sapiens
aaagcttaaaaagtctgctaaa

SEQ ID NO: 2989 - DNA, 22 bp, Homo Sapiens
gaaagcttaaaaagtctgctaa

SEQ ID NO: 2990 - DNA, 22 bp, Homo Sapiens
agaaagcttaaaaagtctgcta

SEQ ID NO: 2991 - DNA, 22 bp, Homo Sapiens
aagaaagcttaaaaagtctgct

SEQ ID NO: 2992 - DNA, 22 bp, Homo Sapiens
aaagaaagcttaaaaagtctgc

SEQ ID NO: 2993 - DNA, 22 bp, Homo Sapiens
taaagaaagcttaaaaagtctg

SEQ ID NO: 2994 - DNA, 22 bp, Homo Sapiens
ctaaagaaagcttaaaaagtct

SEQ ID NO: 2995 - DNA, 22 bp, Homo Sapiens
tctaaagaaagcttaaaaagtc

SEQ ID NO: 2996 - DNA, 22 bp, Homo Sapiens
ttctaaagaaagcttaaaaagt

SEQ ID NO: 2997 - DNA, 22 bp, Homo Sapiens
cttctaaagaaagcttaaaaag

SEQ ID NO: 2998 - DNA, 22 bp, Homo Sapiens
tcttctaaagaaagcttaaaaa

SEQ ID NO: 2999 - DNA, 23 bp, Homo Sapiens
gccctacctcttttttctgtctg

SEQ ID NO: 3000 - DNA, 23 bp, Homo Sapiens
cgccctacctcttttttctgtct

SEQ ID NO: 3001 - DNA, 23 bp, Homo Sapiens
tcgccctacctcttttttctgtc

SEQ ID NO: 3002 - DNA, 23 bp, Homo Sapiens
gtcgccctacctcttttttctgt

SEQ ID NO: 3003 - DNA, 23 bp, Homo Sapiens
tgtcgccctacctcttttttctg

SEQ ID NO: 3004 - DNA, 23 bp, Homo Sapiens
ctgtcgccctacctcttttttct

SEQ ID NO: 3005 - DNA, 23 bp, Homo Sapiens
tctgtcgccctacctcttttttc

SEQ ID NO: 3006 - DNA, 23 bp, Homo Sapiens
atctgtcgccctacctctttttt

SEQ ID NO: 3007 - DNA, 23 bp, Homo Sapiens
gatctgtcgccctacctcttttt

SEQ ID NO: 3008 - DNA, 23 bp, Homo Sapiens
agatctgtcgccctacctctttt

SEQ ID NO: 3009 - DNA, 23 bp, Homo Sapiens
tagatctgtcgccctacctcttt

SEQ ID NO: 3010 - DNA, 23 bp, Homo Sapiens
ttagatctgtcgccctacctctt

SEQ ID NO: 3011 - DNA, 23 bp, Homo Sapiens
attagatctgtcgccctacctct

SEQ ID NO: 3012 - DNA, 23 bp, Homo Sapiens
tattagatctgtcgccctacctc

SEQ ID NO: 3013 - DNA, 23 bp, Homo Sapiens
ctattagatctgtcgccctacct

SEQ ID NO: 3014 - DNA, 23 bp, Homo Sapiens
cctattagatctgtcgccctacc

SEQ ID NO: 3015 - DNA, 23 bp, Homo Sapiens
tcctattagatctgtcgccctac

SEQ ID NO: 3016 - DNA, 23 bp, Homo Sapiens
ttcctattagatctgtcgcccta

SEQ ID NO: 3017 - DNA, 23 bp, Homo Sapiens
attcctattagatctgtcgccct

SEQ ID NO: 3018 - DNA, 23 bp, Homo Sapiens
cattcctattagatctgtcgccc

SEQ ID NO: 3019 - DNA, 23 bp, Homo Sapiens
tcattcctattagatctgtcgcc

SEQ ID NO: 3020 - DNA, 23 bp, Homo Sapiens
ttcattcctattagatctgtcgc

SEQ ID NO: 3021 - DNA, 23 bp, Homo Sapiens
tttcattcctattagatctgtcg

SEQ ID NO: 3022 - DNA, 23 bp, Homo Sapiens
ttttcattcctattagatctgtc

SEQ ID NO: 3023 - DNA, 23 bp, Homo Sapiens
gttttcattcctattagatctgt

SEQ ID NO: 3024 - DNA, 23 bp, Homo Sapiens
tgttttcattcctattagatctg

SEQ ID NO: 3025 - DNA, 23 bp, Homo Sapiens
atgttttcattcctattagatct

SEQ ID NO: 3026 - DNA, 23 bp, Homo Sapiens
aatgttttcattcctattagatc

SEQ ID NO: 3027 - DNA, 23 bp, Homo Sapiens
aaatgttttcattcctattagat

SEQ ID NO: 3028 - DNA, 23 bp, Homo Sapiens
aaaatgttttcattcctattaga

SEQ ID NO: 3029 - DNA, 23 bp, Homo Sapiens
taaaatgttttcattcctattag

SEQ ID NO: 3030 - DNA, 23 bp, Homo Sapiens
ctaaaatgttttcattcctatta

SEQ ID NO: 3031 - DNA, 23 bp, Homo Sapiens
gctaaaatgttttcattcctatt

SEQ ID NO: 3032 - DNA, 23 bp, Homo Sapiens
tgctaaaatgttttcattcctat

SEQ ID NO: 3033 - DNA, 23 bp, Homo Sapiens
ctgctaaaatgttttcattccta

SEQ ID NO: 3034 - DNA, 23 bp, Homo Sapiens
tctgctaaaatgttttcattcct

SEQ ID NO: 3035 - DNA, 23 bp, Homo Sapiens
gtctgctaaaatgttttcattcc

SEQ ID NO: 3036 - DNA, 23 bp, Homo Sapiens
agtctgctaaaatgttttcattc

SEQ ID NO: 3037 - DNA, 23 bp, Homo Sapiens
aagtctgctaaaatgttttcatt

SEQ ID NO: 3038 - DNA, 23 bp, Homo Sapiens
aaagtctgctaaaatgttttcat

SEQ ID NO: 3039 - DNA, 23 bp, Homo Sapiens
aaaagtctgctaaaatgttttca

SEQ ID NO: 3040 - DNA, 23 bp, Homo Sapiens
aaaaagtctgctaaaatgttttc

SEQ ID NO: 3041 - DNA, 23 bp, Homo Sapiens
taaaaagtctgctaaaatgtttt

SEQ ID NO: 3042 - DNA, 23 bp, Homo Sapiens
ttaaaaagtctgctaaaatgttt

SEQ ID NO: 3043 - DNA, 23 bp, Homo Sapiens
cttaaaaagtctgctaaaatgtt

SEQ ID NO: 3044 - DNA, 23 bp, Homo Sapiens
gcttaaaaagtctgctaaaatgt

SEQ ID NO: 3045 - DNA, 23 bp, Homo Sapiens
agcttaaaaagtctgctaaaatg

SEQ ID NO: 3046 - DNA, 23 bp, Homo Sapiens
aagcttaaaaagtctgctaaaat

SEQ ID NO: 3047 - DNA, 23 bp, Homo Sapiens
aaagcttaaaaagtctgctaaaa

SEQ ID NO: 3048 - DNA, 23 bp, Homo Sapiens
gaaagcttaaaaagtctgctaaa

SEQ ID NO: 3049 - DNA, 23 bp, Homo Sapiens
agaaagcttaaaaagtctgctaa

SEQ ID NO: 3050 - DNA, 23 bp, Homo Sapiens
aagaaagcttaaaaagtctgcta

SEQ ID NO: 3051 - DNA, 23 bp, Homo Sapiens
aaagaaagcttaaaaagtctgct

SEQ ID NO: 3052 - DNA, 23 bp, Homo Sapiens
taaagaaagcttaaaaagtctgc

SEQ ID NO: 3053 - DNA, 23 bp, Homo Sapiens
ctaaagaaagcttaaaaagtctg

SEQ ID NO: 3054 - DNA, 23 bp, Homo Sapiens
tctaaagaaagcttaaaaagtct

SEQ ID NO: 3055 - DNA, 23 bp, Homo Sapiens
ttctaaagaaagcttaaaaagtc

SEQ ID NO: 3056 - DNA, 23 bp, Homo Sapiens
cttctaaagaaagcttaaaaagt

SEQ ID NO: 3057 - DNA, 23 bp, Homo Sapiens
tcttctaaagaaagcttaaaaag

SEQ ID NO: 3058 - DNA, 23 bp, Homo Sapiens
ttcttctaaagaaagcttaaaaa

SEQ ID NO: 3059 - DNA, 24 bp, Homo Sapiens
gccctacctcttttttctgtctga

SEQ ID NO: 3060 - DNA, 24 bp, Homo Sapiens
cgccctacctcttttttctgtctg

SEQ ID NO: 3061 - DNA, 24 bp, Homo Sapiens
tcgccctacctcttttttctgtct

SEQ ID NO: 3062 - DNA, 24 bp, Homo Sapiens
gtcgccctacctcttttttctgtc

SEQ ID NO: 3063 - DNA, 24 bp, Homo Sapiens
tgtcgccctacctcttttttctgt

SEQ ID NO: 3064 - DNA, 24 bp, Homo Sapiens
ctgtcgccctacctcttttttctg

SEQ ID NO: 3065 - DNA, 24 bp, Homo Sapiens
tctgtcgccctacctcttttttct

SEQ ID NO: 3066 - DNA, 24 bp, Homo Sapiens
atctgtcgccctacctcttttttc

SEQ ID NO: 3067 - DNA, 24 bp, Homo Sapiens
gatctgtcgccctacctctttttt

SEQ ID NO: 3068 - DNA, 24 bp, Homo Sapiens
agatctgtcgccctacctcttttt

SEQ ID NO: 3069 - DNA, 24 bp, Homo Sapiens
tagatctgtcgccctacctctttt

SEQ ID NO: 3070 - DNA, 24 bp, Homo Sapiens
ttagatctgtcgccctacctcttt

SEQ ID NO: 3071 - DNA, 24 bp, Homo Sapiens
attagatctgtcgccctacctctt

SEQ ID NO: 3072 - DNA, 24 bp, Homo Sapiens
tattagatctgtcgccctacctct

SEQ ID NO: 3073 - DNA, 24 bp, Homo Sapiens
ctattagatctgtcgccctacctc

SEQ ID NO: 3074 - DNA, 24 bp, Homo Sapiens
cctattagatctgtcgccctacct

SEQ ID NO: 3075 - DNA, 24 bp, Homo Sapiens
tcctattagatctgtcgccctacc

SEQ ID NO: 3076 - DNA, 24 bp, Homo Sapiens
ttcctattagatctgtcgccctac

SEQ ID NO: 3077 - DNA, 24 bp, Homo Sapiens
attcctattagatctgtcgcccta

SEQ ID NO: 3078 - DNA, 24 bp, Homo Sapiens
cattcctattagatctgtcgccct

SEQ ID NO: 3079 - DNA, 24 bp, Homo Sapiens
tcattcctattagatctgtcgccc

SEQ ID NO: 3080 - DNA, 24 bp, Homo Sapiens
ttcattcctattagatctgtcgcc

SEQ ID NO: 3081 - DNA, 24 bp, Homo Sapiens
tttcattcctattagatctgtcgc

SEQ ID NO: 3082 - DNA, 24 bp, Homo Sapiens
ttttcattcctattagatctgtcg

SEQ ID NO: 3083 - DNA, 24 bp, Homo Sapiens
gttttcattcctattagatctgtc

SEQ ID NO: 3084 - DNA, 24 bp, Homo Sapiens
tgttttcattcctattagatctgt

SEQ ID NO: 3085 - DNA, 24 bp, Homo Sapiens
atgttttcattcctattagatctg

SEQ ID NO: 3086 - DNA, 24 bp, Homo Sapiens
aatgttttcattcctattagatct

SEQ ID NO: 3087 - DNA, 24 bp, Homo Sapiens
aaatgttttcattcctattagatc

SEQ ID NO: 3088 - DNA, 24 bp, Homo Sapiens
aaaatgttttcattcctattagat

SEQ ID NO: 3089 - DNA, 24 bp, Homo Sapiens
taaaatgttttcattcctattaga

SEQ ID NO: 3090 - DNA, 24 bp, Homo Sapiens
ctaaaatgttttcattcctattag

SEQ ID NO: 3091 - DNA, 24 bp, Homo Sapiens
gctaaaatgttttcattcctatta

SEQ ID NO: 3092 - DNA, 24 bp, Homo Sapiens
tgctaaaatgttttcattcctatt

SEQ ID NO: 3093 - DNA, 24 bp, Homo Sapiens
ctgctaaaatgttttcattcctat

SEQ ID NO: 3094 - DNA, 24 bp, Homo Sapiens
tctgctaaaatgttttcattccta

SEQ ID NO: 3095 - DNA, 24 bp, Homo Sapiens
gtctgctaaaatgttttcattcct

SEQ ID NO: 3096 - DNA, 24 bp, Homo Sapiens
agtctgctaaaatgttttcattcc

SEQ ID NO: 3097 - DNA, 24 bp, Homo Sapiens
aagtctgctaaaatgttttcattc

SEQ ID NO: 3098 - DNA, 24 bp, Homo Sapiens
aaagtctgctaaaatgttttcatt

SEQ ID NO: 3099 - DNA, 24 bp, Homo Sapiens
aaaagtctgctaaaatgttttcat

SEQ ID NO: 3100 - DNA, 24 bp, Homo Sapiens
aaaaagtctgctaaaatgttttca

SEQ ID NO: 3101 - DNA, 24 bp, Homo Sapiens
taaaaagtctgctaaaatgttttc

SEQ ID NO: 3102 - DNA, 24 bp, Homo Sapiens
ttaaaaagtctgctaaaatgtttt

SEQ ID NO: 3103 - DNA, 24 bp, Homo Sapiens
cttaaaaagtctgctaaaatgttt

SEQ ID NO: 3104 - DNA, 24 bp, Homo Sapiens
gcttaaaaagtctgctaaaatgtt

SEQ ID NO: 3105 - DNA, 24 bp, Homo Sapiens
agcttaaaaagtctgctaaaatgt

SEQ ID NO: 3106 - DNA, 24 bp, Homo Sapiens
aagcttaaaaagtctgctaaaatg

SEQ ID NO: 3107 - DNA, 24 bp, Homo Sapiens
aaagcttaaaaagtctgctaaaat

SEQ ID NO: 3108 - DNA, 24 bp, Homo Sapiens
gaaagcttaaaaagtctgctaaaa

SEQ ID NO: 3109 - DNA, 24 bp, Homo Sapiens
agaaagcttaaaaagtctgctaaa

SEQ ID NO: 3110 - DNA, 24 bp, Homo Sapiens
aagaaagcttaaaaagtctgctaa

SEQ ID NO: 3111 - DNA, 24 bp, Homo Sapiens
aaagaaagcttaaaaagtctgcta

SEQ ID NO: 3112 - DNA, 24 bp, Homo Sapiens
taaagaaagcttaaaaagtctgct

SEQ ID NO: 3113 - DNA, 24 bp, Homo Sapiens
ctaaagaaagcttaaaaagtctgc

SEQ ID NO: 3114 - DNA, 24 bp, Homo Sapiens
tctaaagaaagcttaaaaagtctg

SEQ ID NO: 3115 - DNA, 24 bp, Homo Sapiens
ttctaaagaaagcttaaaaagtct

SEQ ID NO: 3116 - DNA, 24 bp, Homo Sapiens
cttctaaagaaagcttaaaaagtc

SEQ ID NO: 3117 - DNA, 24 bp, Homo Sapiens
tcttctaaagaaagcttaaaaagt

SEQ ID NO: 3118 - DNA, 24 bp, Homo Sapiens
ttcttctaaagaaagcttaaaaag

SEQ ID NO: 3119 - DNA, 24 bp, Homo Sapiens
attcttctaaagaaagcttaaaaa

SEQ ID NO: 3120 - DNA, 25 bp, Homo Sapiens
gccctacctcttttttctgtctgac

SEQ ID NO: 3121 - DNA, 25 bp, Homo Sapiens
cgccctacctcttttttctgtctga

SEQ ID NO: 3122 - DNA, 25 bp, Homo Sapiens
tcgccctacctcttttttctgtctg

SEQ ID NO: 3123 - DNA, 25 bp, Homo Sapiens
gtcgccctacctcttttttctgtct

SEQ ID NO: 3124 - DNA, 25 bp, Homo Sapiens
tgtcgccctacctcttttttctgtc

SEQ ID NO: 3125 - DNA, 25 bp, Homo Sapiens
ctgtcgccctacctcttttttctgt

SEQ ID NO: 3126 - DNA, 25 bp, Homo Sapiens
tctgtcgccctacctcttttttctg

SEQ ID NO: 3127 - DNA, 25 bp, Homo Sapiens
atctgtcgccctacctcttttttct

SEQ ID NO: 3128 - DNA, 25 bp, Homo Sapiens
gatctgtcgccctacctcttttttc

SEQ ID NO: 3129 - DNA, 25 bp, Homo Sapiens
agatctgtcgccctacctctttttt

SEQ ID NO: 3130 - DNA, 25 bp, Homo Sapiens
tagatctgtcgccctacctcttttt

SEQ ID NO: 3131 - DNA, 25 bp, Homo Sapiens
ttagatctgtcgccctacctctttt

SEQ ID NO: 3132 - DNA, 25 bp, Homo Sapiens
attagatctgtcgccctacctcttt

SEQ ID NO: 3133 - DNA, 25 bp, Homo Sapiens
tattagatctgtcgccctacctctt

SEQ ID NO: 3134 - DNA, 25 bp, Homo Sapiens
ctattagatctgtcgccctacctct

SEQ ID NO: 3135 - DNA, 25 bp, Homo Sapiens
cctattagatctgtcgccctacctc

SEQ ID NO: 3136 - DNA, 25 bp, Homo Sapiens
tcctattagatctgtcgccctacct

SEQ ID NO: 3137 - DNA, 25 bp, Homo Sapiens
ttcctattagatctgtcgccctacc

SEQ ID NO: 3138 - DNA, 25 bp, Homo Sapiens
attcctattagatctgtcgccctac

SEQ ID NO: 3139 - DNA, 25 bp, Homo Sapiens
cattcctattagatctgtcgcccta

SEQ ID NO: 3140 - DNA, 25 bp, Homo Sapiens
tcattcctattagatctgtcgccct

SEQ ID NO: 3141 - DNA, 25 bp, Homo Sapiens
ttcattcctattagatctgtcgccc

SEQ ID NO: 3142 - DNA, 25 bp, Homo Sapiens
tttcattcctattagatctgtcgcc

SEQ ID NO: 3143 - DNA, 25 bp, Homo Sapiens
ttttcattcctattagatctgtcgc

SEQ ID NO: 3144 - DNA, 25 bp, Homo Sapiens
gttttcattcctattagatctgtcg

SEQ ID NO: 3145 - DNA, 25 bp, Homo Sapiens
tgttttcattcctattagatctgtc

SEQ ID NO: 3146 - DNA, 25 bp, Homo Sapiens
atgttttcattcctattagatctgt

SEQ ID NO: 3147 - DNA, 25 bp, Homo Sapiens
aatgttttcattcctattagatctg

SEQ ID NO: 3148 - DNA, 25 bp, Homo Sapiens
aaatgttttcattcctattagatct

SEQ ID NO: 3149 - DNA, 25 bp, Homo Sapiens
aaaatgttttcattcctattagatc

SEQ ID NO: 3150 - DNA, 25 bp, Homo Sapiens
taaaatgttttcattcctattagat

SEQ ID NO: 3151 - DNA, 25 bp, Homo Sapiens
ctaaaatgttttcattcctattaga

SEQ ID NO: 3152 - DNA, 25 bp, Homo Sapiens
gctaaaatgttttcattcctattag

SEQ ID NO: 3153 - DNA, 25 bp, Homo Sapiens
tgctaaaatgttttcattcctatta

SEQ ID NO: 3154 - DNA, 25 bp, Homo Sapiens
ctgctaaaatgttttcattcctatt

SEQ ID NO: 3155 - DNA, 25 bp, Homo Sapiens
tctgctaaaatgttttcattcctat

SEQ ID NO: 3156 - DNA, 25 bp, Homo Sapiens
gtctgctaaaatgttttcattccta

SEQ ID NO: 3157 - DNA, 25 bp, Homo Sapiens
agtctgctaaaatgttttcattcct

SEQ ID NO: 3158 - DNA, 25 bp, Homo Sapiens
aagtctgctaaaatgttttcattcc

SEQ ID NO: 3159 - DNA, 25 bp, Homo Sapiens
aaagtctgctaaaatgttttcattc

SEQ ID NO: 3160 - DNA, 25 bp, Homo Sapiens
aaaagtctgctaaaatgttttcatt

SEQ ID NO: 3161 - DNA, 25 bp, Homo Sapiens
aaaaagtctgctaaaatgttttcat

SEQ ID NO: 3162 - DNA, 25 bp, Homo Sapiens
taaaaagtctgctaaaatgttttca

SEQ ID NO: 3163 - DNA, 25 bp, Homo Sapiens
ttaaaaagtctgctaaaatgttttc

SEQ ID NO: 3164 - DNA, 25 bp, Homo Sapiens
cttaaaaagtctgctaaaatgtttt

SEQ ID NO: 3165 - DNA, 25 bp, Homo Sapiens
gcttaaaaagtctgctaaaatgttt

SEQ ID NO: 3166 - DNA, 25 bp, Homo Sapiens
agcttaaaaagtctgctaaaatgtt

SEQ ID NO: 3167 - DNA, 25 bp, Homo Sapiens
aagcttaaaaagtctgctaaaatgt

SEQ ID NO: 3168 - DNA, 25 bp, Homo Sapiens
aaagcttaaaaagtctgctaaaatg

SEQ ID NO: 3169 - DNA, 25 bp, Homo Sapiens
gaaagcttaaaaagtctgctaaaat

SEQ ID NO: 3170 - DNA, 25 bp, Homo Sapiens
agaaagcttaaaaagtctgctaaaa

SEQ ID NO: 3171 - DNA, 25 bp, Homo Sapiens
aagaaagcttaaaaagtctgctaaa

SEQ ID NO: 3172 - DNA, 25 bp, Homo Sapiens
aaagaaagcttaaaaagtctgctaa

SEQ ID NO: 3173 - DNA, 25 bp, Homo Sapiens
taaagaaagcttaaaaagtctgcta

SEQ ID NO: 3174 - DNA, 25 bp, Homo Sapiens
ctaaagaaagcttaaaaagtctgct

SEQ ID NO: 3175 - DNA, 25 bp, Homo Sapiens
tctaaagaaagcttaaaaagtctgc

SEQ ID NO: 3176 - DNA, 25 bp, Homo Sapiens
ttctaaagaaagcttaaaaagtctg

SEQ ID NO: 3177 - DNA, 25 bp, Homo Sapiens
cttctaaagaaagcttaaaaagtct

SEQ ID NO: 3178 - DNA, 25 bp, Homo Sapiens
tcttctaaagaaagcttaaaaagtc

SEQ ID NO: 3179 - DNA, 25 bp, Homo Sapiens
ttcttctaaagaaagcttaaaaagt

SEQ ID NO: 3180 - DNA, 25 bp, Homo Sapiens
attcttctaaagaaagcttaaaaag

SEQ ID NO: 3181 - DNA, 25 bp, Homo Sapiens
tattcttctaaagaaagcttaaaaa

SEQ ID NO: 3182 - DNA, 26 bp, Homo Sapiens
gccctacctcttttttctgtctgaca

SEQ ID NO: 3183 - DNA, 26 bp, Homo Sapiens
cgccctacctcttttttctgtctgac

SEQ ID NO: 3184 - DNA, 26 bp, Homo Sapiens
tcgccctacctcttttttctgtctga

SEQ ID NO: 3185 - DNA, 26 bp, Homo Sapiens
gtcgccctacctcttttttctgtctg

SEQ ID NO: 3186 - DNA, 26 bp, Homo Sapiens
tgtcgccctacctcttttttctgtct

SEQ ID NO: 3187 - DNA, 26 bp, Homo Sapiens
ctgtcgccctacctcttttttctgtc

SEQ ID NO: 3188 - DNA, 26 bp, Homo Sapiens
tctgtcgccctacctcttttttctgt

SEQ ID NO: 3189 - DNA, 26 bp, Homo Sapiens
atctgtcgccctacctcttttttctg

SEQ ID NO: 3190 - DNA, 26 bp, Homo Sapiens
gatctgtcgccctacctcttttttct

SEQ ID NO: 3191 - DNA, 26 bp, Homo Sapiens
agatctgtcgccctacctcttttttc

SEQ ID NO: 3192 - DNA, 26 bp, Homo Sapiens
tagatctgtcgccctacctctttttt

SEQ ID NO: 3193 - DNA, 26 bp, Homo Sapiens
ttagatctgtcgccctacctcttttt

SEQ ID NO: 3194 - DNA, 26 bp, Homo Sapiens
attagatctgtcgccctacctctttt

SEQ ID NO: 3195 - DNA, 26 bp, Homo Sapiens
tattagatctgtcgccctacctcttt

SEQ ID NO: 3196 - DNA, 26 bp, Homo Sapiens
ctattagatctgtcgccctacctctt

SEQ ID NO: 3197 - DNA, 26 bp, Homo Sapiens
cctattagatctgtcgccctacctct

SEQ ID NO: 3198 - DNA, 26 bp, Homo Sapiens
tcctattagatctgtcgccctacctc

SEQ ID NO: 3199 - DNA, 26 bp, Homo Sapiens
ttcctattagatctgtcgccctacct

SEQ ID NO: 3200 - DNA, 26 bp, Homo Sapiens
attcctattagatctgtcgccctacc

SEQ ID NO: 3201 - DNA, 26 bp, Homo Sapiens
cattcctattagatctgtcgccctac

SEQ ID NO: 3202 - DNA, 26 bp, Homo Sapiens
tcattcctattagatctgtcgcccta

SEQ ID NO: 3203 - DNA, 26 bp, Homo Sapiens
ttcattcctattagatctgtcgccct

SEQ ID NO: 3204 - DNA, 26 bp, Homo Sapiens
tttcattcctattagatctgtcgccc

SEQ ID NO: 3205 - DNA, 26 bp, Homo Sapiens
ttttcattcctattagatctgtcgcc

SEQ ID NO: 3206 - DNA, 26 bp, Homo Sapiens
gttttcattcctattagatctgtcgc

SEQ ID NO: 3207 - DNA, 26 bp, Homo Sapiens
tgttttcattcctattagatctgtcg

SEQ ID NO: 3208 - DNA, 26 bp, Homo Sapiens
atgttttcattcctattagatctgtc

SEQ ID NO: 3209 - DNA, 26 bp, Homo Sapiens
aatgttttcattcctattagatctgt

SEQ ID NO: 3210 - DNA, 26 bp, Homo Sapiens
aaatgttttcattcctattagatctg

SEQ ID NO: 3211 - DNA, 26 bp, Homo Sapiens
aaaatgttttcattcctattagatct

SEQ ID NO: 3212 - DNA, 26 bp, Homo Sapiens
taaaatgttttcattcctattagatc

SEQ ID NO: 3213 - DNA, 26 bp, Homo Sapiens
ctaaaatgttttcattcctattagat

SEQ ID NO: 3214 - DNA, 26 bp, Homo Sapiens
gctaaaatgttttcattcctattaga

SEQ ID NO: 3215 - DNA, 26 bp, Homo Sapiens
tgctaaaatgttttcattcctattag

SEQ ID NO: 3216 - DNA, 26 bp, Homo Sapiens
ctgctaaaatgttttcattcctatta

SEQ ID NO: 3217 - DNA, 26 bp, Homo Sapiens
tctgctaaaatgttttcattcctatt

SEQ ID NO: 3218 - DNA, 26 bp, Homo Sapiens
gtctgctaaaatgttttcattcctat

SEQ ID NO: 3219 - DNA, 26 bp, Homo Sapiens
agtctgctaaaatgttttcattccta

SEQ ID NO: 3220 - DNA, 26 bp, Homo Sapiens
aagtctgctaaaatgttttcattcct

SEQ ID NO: 3221 - DNA, 26 bp, Homo Sapiens
aaagtctgctaaaatgttttcattcc

SEQ ID NO: 3222 - DNA, 26 bp, Homo Sapiens
aaaagtctgctaaaatgttttcattc

SEQ ID NO: 3223 - DNA, 26 bp, Homo Sapiens
aaaaagtctgctaaaatgttttcatt

SEQ ID NO: 3224 - DNA, 26 bp, Homo Sapiens
taaaaagtctgctaaaatgttttcat

SEQ ID NO: 3225 - DNA, 26 bp, Homo Sapiens
ttaaaaagtctgctaaaatgttttca

SEQ ID NO: 3226 - DNA, 26 bp, Homo Sapiens
cttaaaaagtctgctaaaatgttttc

SEQ ID NO: 3227 - DNA, 26 bp, Homo Sapiens
gcttaaaaagtctgctaaaatgtttt

SEQ ID NO: 3228 - DNA, 26 bp, Homo Sapiens
agcttaaaaagtctgctaaaatgttt

SEQ ID NO: 3229 - DNA, 26 bp, Homo Sapiens
aagcttaaaaagtctgctaaaatgtt

SEQ ID NO: 3230 - DNA, 26 bp, Homo Sapiens
aaagcttaaaaagtctgctaaaatgt

SEQ ID NO: 3231 - DNA, 26 bp, Homo Sapiens
gaaagcttaaaaagtctgctaaaatg

SEQ ID NO: 3232 - DNA, 26 bp, Homo Sapiens
agaaagcttaaaaagtctgctaaaat

SEQ ID NO: 3233 - DNA, 26 bp, Homo Sapiens
aagaaagcttaaaaagtctgctaaaa

SEQ ID NO: 3234 - DNA, 26 bp, Homo Sapiens
aaagaaagcttaaaaagtctgctaaa

SEQ ID NO: 3235 - DNA, 26 bp, Homo Sapiens
taaagaaagcttaaaaagtctgctaa

SEQ ID NO: 3236 - DNA, 26 bp, Homo Sapiens
ctaaagaaagcttaaaaagtctgcta

SEQ ID NO: 3237 - DNA, 26 bp, Homo Sapiens
tctaaagaaagcttaaaaagtctgct

SEQ ID NO: 3238 - DNA, 26 bp, Homo Sapiens
ttctaaagaaagcttaaaaagtctgc

SEQ ID NO: 3239 - DNA, 26 bp, Homo Sapiens
cttctaaagaaagcttaaaaagtctg

SEQ ID NO: 3240 - DNA, 26 bp, Homo Sapiens
tcttctaaagaaagcttaaaaagtct

SEQ ID NO: 3241 - DNA, 26 bp, Homo Sapiens
ttcttctaaagaaagcttaaaaagtc

SEQ ID NO: 3242 - DNA, 26 bp, Homo Sapiens
attcttctaaagaaagcttaaaaagt

SEQ ID NO: 3243 - DNA, 26 bp, Homo Sapiens
tattcttctaaagaaagcttaaaaag

SEQ ID NO: 3244 - DNA, 26 bp, Homo Sapiens
atattcttctaaagaaagcttaaaaa

SEQ ID NO: 3245 - DNA, 27 bp, Homo Sapiens
gccctacctcttttttctgtctgacag

SEQ ID NO: 3246 - DNA, 27 bp, Homo Sapiens
cgccctacctcttttttctgtctgaca

SEQ ID NO: 3247 - DNA, 27 bp, Homo Sapiens
tcgccctacctcttttttctgtctgac

SEQ ID NO: 3248 - DNA, 27 bp, Homo Sapiens
gtcgccctacctcttttttctgtctga

SEQ ID NO: 3249 - DNA, 27 bp, Homo Sapiens
tgtcgccctacctcttttttctgtctg

SEQ ID NO: 3250 - DNA, 27 bp, Homo Sapiens
ctgtcgccctacctcttttttctgtct

SEQ ID NO: 3251 - DNA, 27 bp, Homo Sapiens
tctgtcgccctacctcttttttctgtc

SEQ ID NO: 3252 - DNA, 27 bp, Homo Sapiens
atctgtcgccctacctcttttttctgt

SEQ ID NO: 3253 - DNA, 27 bp, Homo Sapiens
gatctgtcgccctacctcttttttctg

SEQ ID NO: 3254 - DNA, 27 bp, Homo Sapiens
agatctgtcgccctacctcttttttct

SEQ ID NO: 3255 - DNA, 27 bp, Homo Sapiens
tagatctgtcgccctacctcttttttc

SEQ ID NO: 3256 - DNA, 27 bp, Homo Sapiens
ttagatctgtcgccctacctctttttt

SEQ ID NO: 3257 - DNA, 27 bp, Homo Sapiens
attagatctgtcgccctacctcttttt

SEQ ID NO: 3258 - DNA, 27 bp, Homo Sapiens
tattagatctgtcgccctacctctttt

SEQ ID NO: 3259 - DNA, 27 bp, Homo Sapiens
ctattagatctgtcgccctacctcttt

SEQ ID NO: 3260 - DNA, 27 bp, Homo Sapiens
cctattagatctgtcgccctacctctt

SEQ ID NO: 3261 - DNA, 27 bp, Homo Sapiens
tcctattagatctgtcgccctacctct

SEQ ID NO: 3262 - DNA, 27 bp, Homo Sapiens
ttcctattagatctgtcgccctacctc

SEQ ID NO: 3263 - DNA, 27 bp, Homo Sapiens
attcctattagatctgtcgccctacct

SEQ ID NO: 3264 - DNA, 27 bp, Homo Sapiens
cattcctattagatctgtcgccctacc

SEQ ID NO: 3265 - DNA, 27 bp, Homo Sapiens
tcattcctattagatctgtcgccctac

SEQ ID NO: 3266 - DNA, 27 bp, Homo Sapiens
ttcattcctattagatctgtcgcccta

SEQ ID NO: 3267 - DNA, 27 bp, Homo Sapiens
tttcattcctattagatctgtcgccct

SEQ ID NO: 3268 - DNA, 27 bp, Homo Sapiens
ttttcattcctattagatctgtcgccc

SEQ ID NO: 3269 - DNA, 27 bp, Homo Sapiens
gttttcattcctattagatctgtcgcc

SEQ ID NO: 3270 - DNA, 27 bp, Homo Sapiens
tgttttcattcctattagatctgtcgc

SEQ ID NO: 3271 - DNA, 27 bp, Homo Sapiens
atgttttcattcctattagatctgtcg

SEQ ID NO: 3272 - DNA, 27 bp, Homo Sapiens
aatgttttcattcctattagatctgtc

SEQ ID NO: 3273 - DNA, 27 bp, Homo Sapiens
aaatgttttcattcctattagatctgt

SEQ ID NO: 3274 - DNA, 27 bp, Homo Sapiens
aaaatgttttcattcctattagatctg

SEQ ID NO: 3275 - DNA, 27 bp, Homo Sapiens
taaaatgttttcattcctattagatct

SEQ ID NO: 3276 - DNA, 27 bp, Homo Sapiens
ctaaaatgttttcattcctattagatc

SEQ ID NO: 3277 - DNA, 27 bp, Homo Sapiens
gctaaaatgttttcattcctattagat

SEQ ID NO: 3278 - DNA, 27 bp, Homo Sapiens
tgctaaaatgttttcattcctattaga

SEQ ID NO: 3279 - DNA, 27 bp, Homo Sapiens
ctgctaaaatgttttcattcctattag

SEQ ID NO: 3280 - DNA, 27 bp, Homo Sapiens
tctgctaaaatgttttcattcctatta

SEQ ID NO: 3281 - DNA, 27 bp, Homo Sapiens
gtctgctaaaatgttttcattcctatt

SEQ ID NO: 3282 - DNA, 27 bp, Homo Sapiens
agtctgctaaaatgttttcattcctat

SEQ ID NO: 3283 - DNA, 27 bp, Homo Sapiens
aagtctgctaaaatgttttcattccta

SEQ ID NO: 3284 - DNA, 27 bp, Homo Sapiens
aaagtctgctaaaatgttttcattcct

SEQ ID NO: 3285 - DNA, 27 bp, Homo Sapiens
aaaagtctgctaaaatgttttcattcc

SEQ ID NO: 3286 - DNA, 27 bp, Homo Sapiens
aaaaagtctgctaaaatgttttcattc

SEQ ID NO: 3287 - DNA, 27 bp, Homo Sapiens
taaaaagtctgctaaaatgttttcatt

SEQ ID NO: 3288 - DNA, 27 bp, Homo Sapiens
ttaaaaagtctgctaaaatgttttcat

SEQ ID NO: 3289 - DNA, 27 bp, Homo Sapiens
cttaaaaagtctgctaaaatgttttca

SEQ ID NO: 3290 - DNA, 27 bp, Homo Sapiens
gcttaaaaagtctgctaaaatgttttc

SEQ ID NO: 3291 - DNA, 27 bp, Homo Sapiens
agcttaaaaagtctgctaaaatgtttt

SEQ ID NO: 3292 - DNA, 27 bp, Homo Sapiens
aagcttaaaaagtctgctaaaatgttt

SEQ ID NO: 3293 - DNA, 27 bp, Homo Sapiens
aaagcttaaaaagtctgctaaaatgtt

SEQ ID NO: 3294 - DNA, 27 bp, Homo Sapiens
gaaagcttaaaaagtctgctaaaatgt

SEQ ID NO: 3295 - DNA, 27 bp, Homo Sapiens
agaaagcttaaaaagtctgctaaaatg

SEQ ID NO: 3296 - DNA, 27 bp, Homo Sapiens
aagaaagcttaaaaagtctgctaaaat

SEQ ID NO: 3297 - DNA, 27 bp, Homo Sapiens
aaagaaagcttaaaaagtctgctaaaa

SEQ ID NO: 3298 - DNA, 27 bp, Homo Sapiens
taaagaaagcttaaaaagtctgctaaa

SEQ ID NO: 3299 - DNA, 27 bp, Homo Sapiens
ctaaagaaagcttaaaaagtctgctaa

SEQ ID NO: 3300 - DNA, 27 bp, Homo Sapiens
tctaaagaaagcttaaaaagtctgcta

SEQ ID NO: 3301 - DNA, 27 bp, Homo Sapiens
ttctaaagaaagcttaaaaagtctgct

SEQ ID NO: 3302 - DNA, 27 bp, Homo Sapiens
cttctaaagaaagcttaaaaagtctgc

SEQ ID NO: 3303 - DNA, 27 bp, Homo Sapiens
tcttctaaagaaagcttaaaaagtctg

SEQ ID NO: 3304 - DNA, 27 bp, Homo Sapiens
ttcttctaaagaaagcttaaaaagtct

SEQ ID NO: 3305 - DNA, 27 bp, Homo Sapiens
attcttctaaagaaagcttaaaaagtc

SEQ ID NO: 3306 - DNA, 27 bp, Homo Sapiens
tattcttctaaagaaagcttaaaaagt

SEQ ID NO: 3307 - DNA, 27 bp, Homo Sapiens
atattcttctaaagaaagcttaaaaag

SEQ ID NO: 3308 - DNA, 27 bp, Homo Sapiens
aatattcttctaaagaaagcttaaaaa

SEQ ID NO: 3309 - DNA, 28 bp, Homo Sapiens
gccctacctcttttttctgtctgacagc

SEQ ID NO: 3310 - DNA, 28 bp, Homo Sapiens
cgccctacctcttttttctgtctgacag

SEQ ID NO: 3311 - DNA, 28 bp, Homo Sapiens
tcgccctacctcttttttctgtctgaca

SEQ ID NO: 3312 - DNA, 28 bp, Homo Sapiens
gtcgccctacctcttttttctgtctgac

SEQ ID NO: 3313 - DNA, 28 bp, Homo Sapiens
tgtcgccctacctcttttttctgtctga

SEQ ID NO: 3314 - DNA, 28 bp, Homo Sapiens
ctgtcgccctacctcttttttctgtctg

SEQ ID NO: 3315 - DNA, 28 bp, Homo Sapiens
tctgtcgccctacctcttttttctgtct

SEQ ID NO: 3316 - DNA, 28 bp, Homo Sapiens
atctgtcgccctacctcttttttctgtc

SEQ ID NO: 3317 - DNA, 28 bp, Homo Sapiens
gatctgtcgccctacctcttttttctgt

SEQ ID NO: 3318 - DNA, 28 bp, Homo Sapiens
agatctgtcgccctacctcttttttctg

SEQ ID NO: 3319 - DNA, 28 bp, Homo Sapiens
tagatctgtcgccctacctcttttttct

SEQ ID NO: 3320 - DNA, 28 bp, Homo Sapiens
ttagatctgtcgccctacctcttttttc

SEQ ID NO: 3321 - DNA, 28 bp, Homo Sapiens
attagatctgtcgccctacctctttttt

SEQ ID NO: 3322 - DNA, 28 bp, Homo Sapiens
tattagatctgtcgccctacctcttttt

SEQ ID NO: 3323 - DNA, 28 bp, Homo Sapiens
ctattagatctgtcgccctacctctttt

SEQ ID NO: 3324 - DNA, 28 bp, Homo Sapiens
cctattagatctgtcgccctacctcttt

SEQ ID NO: 3325 - DNA, 28 bp, Homo Sapiens
tcctattagatctgtcgccctacctctt

SEQ ID NO: 3326 - DNA, 28 bp, Homo Sapiens
ttcctattagatctgtcgccctacctct

SEQ ID NO: 3327 - DNA, 28 bp, Homo Sapiens
attcctattagatctgtcgccctacctc

SEQ ID NO: 3328 - DNA, 28 bp, Homo Sapiens
cattcctattagatctgtcgccctacct

SEQ ID NO: 3329 - DNA, 28 bp, Homo Sapiens
tcattcctattagatctgtcgccctacc

SEQ ID NO: 3330 - DNA, 28 bp, Homo Sapiens
ttcattcctattagatctgtcgccctac

SEQ ID NO: 3331 - DNA, 28 bp, Homo Sapiens
tttcattcctattagatctgtcgcccta

SEQ ID NO: 3332 - DNA, 28 bp, Homo Sapiens
ttttcattcctattagatctgtcgccct

SEQ ID NO: 3333 - DNA, 28 bp, Homo Sapiens
gttttcattcctattagatctgtcgccc

SEQ ID NO: 3334 - DNA, 28 bp, Homo Sapiens
tgttttcattcctattagatctgtcgcc

SEQ ID NO: 3335 - DNA, 28 bp, Homo Sapiens
atgttttcattcctattagatctgtcgc

SEQ ID NO: 3336 - DNA, 28 bp, Homo Sapiens
aatgttttcattcctattagatctgtcg

SEQ ID NO: 3337 - DNA, 28 bp, Homo Sapiens
aaatgttttcattcctattagatctgtc

SEQ ID NO: 3338 - DNA, 28 bp, Homo Sapiens
aaaatgttttcattcctattagatctgt

SEQ ID NO: 3339 - DNA, 28 bp, Homo Sapiens
taaaatgttttcattcctattagatctg

SEQ ID NO: 3340 - DNA, 28 bp, Homo Sapiens
ctaaaatgttttcattcctattagatct

SEQ ID NO: 3341 - DNA, 28 bp, Homo Sapiens
gctaaaatgttttcattcctattagatc

SEQ ID NO: 3342 - DNA, 28 bp, Homo Sapiens
tgctaaaatgttttcattcctattagat

SEQ ID NO: 3343 - DNA, 28 bp, Homo Sapiens
ctgctaaaatgttttcattcctattaga

SEQ ID NO: 3344 - DNA, 28 bp, Homo Sapiens
tctgctaaaatgttttcattcctattag

SEQ ID NO: 3345 - DNA, 28 bp, Homo Sapiens
gtctgctaaaatgttttcattcctatta

SEQ ID NO: 3346 - DNA, 28 bp, Homo Sapiens
agtctgctaaaatgttttcattcctatt

SEQ ID NO: 3347 - DNA, 28 bp, Homo Sapiens
aagtctgctaaaatgttttcattcctat

SEQ ID NO: 3348 - DNA, 28 bp, Homo Sapiens
aaagtctgctaaaatgttttcattccta

SEQ ID NO: 3349 - DNA, 28 bp, Homo Sapiens
aaaagtctgctaaaatgttttcattcct

SEQ ID NO: 3350 - DNA, 28 bp, Homo Sapiens
aaaaagtctgctaaaatgttttcattcc

SEQ ID NO: 3351 - DNA, 28 bp, Homo Sapiens
taaaaagtctgctaaaatgttttcattc

SEQ ID NO: 3352 - DNA, 28 bp, Homo Sapiens
ttaaaaagtctgctaaaatgttttcatt

SEQ ID NO: 3353 - DNA, 28 bp, Homo Sapiens
cttaaaaagtctgctaaaatgttttcat

SEQ ID NO: 3354 - DNA, 28 bp, Homo Sapiens
gcttaaaaagtctgctaaaatgttttca

SEQ ID NO: 3355 - DNA, 28 bp, Homo Sapiens
agcttaaaaagtctgctaaaatgttttc

SEQ ID NO: 3356 - DNA, 28 bp, Homo Sapiens
aagcttaaaaagtctgctaaaatgtttt

SEQ ID NO: 3357 - DNA, 28 bp, Homo Sapiens
aaagcttaaaaagtctgctaaaatgttt

SEQ ID NO: 3358 - DNA, 28 bp, Homo Sapiens
gaaagcttaaaaagtctgctaaaatgtt

SEQ ID NO: 3359 - DNA, 28 bp, Homo Sapiens
agaaagcttaaaaagtctgctaaaatgt

SEQ ID NO: 3360 - DNA, 28 bp, Homo Sapiens
aagaaagcttaaaaagtctgctaaaatg

SEQ ID NO: 3361 - DNA, 28 bp, Homo Sapiens
aaagaaagcttaaaaagtctgctaaaat

SEQ ID NO: 3362 - DNA, 28 bp, Homo Sapiens
taaagaaagcttaaaaagtctgctaaaa

SEQ ID NO: 3363 - DNA, 28 bp, Homo Sapiens
ctaaagaaagcttaaaaagtctgctaaa

SEQ ID NO: 3364 - DNA, 28 bp, Homo Sapiens
tctaaagaaagcttaaaaagtctgctaa

SEQ ID NO: 3365 - DNA, 28 bp, Homo Sapiens
ttctaaagaaagcttaaaaagtctgcta

SEQ ID NO: 3366 - DNA, 28 bp, Homo Sapiens
cttctaaagaaagcttaaaaagtctgct

SEQ ID NO: 3367 - DNA, 28 bp, Homo Sapiens
tcttctaaagaaagcttaaaaagtctgc

SEQ ID NO: 3368 - DNA, 28 bp, Homo Sapiens
ttcttctaaagaaagcttaaaaagtctg

SEQ ID NO: 3369 - DNA, 28 bp, Homo Sapiens
attcttctaaagaaagcttaaaaagtct

SEQ ID NO: 3370 - DNA, 28 bp, Homo Sapiens
tattcttctaaagaaagcttaaaaagtc

SEQ ID NO: 3371 - DNA, 28 bp, Homo Sapiens
atattcttctaaagaaagcttaaaaagt

SEQ ID NO: 3372 - DNA, 28 bp, Homo Sapiens
aatattcttctaaagaaagcttaaaaag

SEQ ID NO: 3373 - DNA, 28 bp, Homo Sapiens
aaatattcttctaaagaaagcttaaaaa

SEQ ID NO: 3374 - DNA, 29 bp, Homo Sapiens
gccctacctcttttttctgtctgacagct

SEQ ID NO: 3375 - DNA, 29 bp, Homo Sapiens
cgccctacctcttttttctgtctgacagc

SEQ ID NO: 3376 - DNA, 29 bp, Homo Sapiens
tcgccctacctcttttttctgtctgacag

SEQ ID NO: 3377 - DNA, 29 bp, Homo Sapiens
gtcgccctacctcttttttctgtctgaca

SEQ ID NO: 3378 - DNA, 29 bp, Homo Sapiens
tgtcgccctacctcttttttctgtctgac

SEQ ID NO: 3379 - DNA, 29 bp, Homo Sapiens
ctgtcgccctacctcttttttctgtctga

SEQ ID NO: 3380 - DNA, 29 bp, Homo Sapiens
tctgtcgccctacctcttttttctgtctg

SEQ ID NO: 3381 - DNA, 29 bp, Homo Sapiens
atctgtcgccctacctcttttttctgtct

SEQ ID NO: 3382 - DNA, 29 bp, Homo Sapiens
gatctgtcgccctacctcttttttctgtc

SEQ ID NO: 3383 - DNA, 29 bp, Homo Sapiens
agatctgtcgccctacctcttttttctgt

SEQ ID NO: 3384 - DNA, 29 bp, Homo Sapiens
tagatctgtcgccctacctcttttttctg

SEQ ID NO: 3385 - DNA, 29 bp, Homo Sapiens
ttagatctgtcgccctacctcttttttct

SEQ ID NO: 3386 - DNA, 29 bp, Homo Sapiens
attagatctgtcgccctacctcttttttc

SEQ ID NO: 3387 - DNA, 29 bp, Homo Sapiens
tattagatctgtcgccctacctctttttt

SEQ ID NO: 3388 - DNA, 29 bp, Homo Sapiens
ctattagatctgtcgccctacctcttttt

SEQ ID NO: 3389 - DNA, 29 bp, Homo Sapiens
cctattagatctgtcgccctacctctttt

SEQ ID NO: 3390 - DNA, 29 bp, Homo Sapiens
tcctattagatctgtcgccctacctcttt

SEQ ID NO: 3391 - DNA, 29 bp, Homo Sapiens
ttcctattagatctgtcgccctacctctt

SEQ ID NO: 3392 - DNA, 29 bp, Homo Sapiens
attcctattagatctgtcgccctacctct

SEQ ID NO: 3393 - DNA, 29 bp, Homo Sapiens
cattcctattagatctgtcgccctacctc

SEQ ID NO: 3394 - DNA, 29 bp, Homo Sapiens
tcattcctattagatctgtcgccctacct

SEQ ID NO: 3395 - DNA, 29 bp, Homo Sapiens
ttcattcctattagatctgtcgccctacc

SEQ ID NO: 3396 - DNA, 29 bp, Homo Sapiens
tttcattcctattagatctgtcgccctac

SEQ ID NO: 3397 - DNA, 29 bp, Homo Sapiens
ttttcattcctattagatctgtcgcccta

SEQ ID NO: 3398 - DNA, 29 bp, Homo Sapiens
gttttcattcctattagatctgtcgccct

SEQ ID NO: 3399 - DNA, 29 bp, Homo Sapiens
tgttttcattcctattagatctgtcgccc

SEQ ID NO: 3400 - DNA, 29 bp, Homo Sapiens
atgttttcattcctattagatctgtcgcc

SEQ ID NO: 3401 - DNA, 29 bp, Homo Sapiens
aatgttttcattcctattagatctgtcgc

SEQ ID NO: 3402 - DNA, 29 bp, Homo Sapiens
aaatgttttcattcctattagatctgtcg

SEQ ID NO: 3403 - DNA, 29 bp, Homo Sapiens
aaaatgttttcattcctattagatctgtc

SEQ ID NO: 3404 - DNA, 29 bp, Homo Sapiens
taaaatgttttcattcctattagatctgt

SEQ ID NO: 3405 - DNA, 29 bp, Homo Sapiens
ctaaaatgttttcattcctattagatctg

SEQ ID NO: 3406 - DNA, 29 bp, Homo Sapiens
gctaaaatgttttcattcctattagatct

SEQ ID NO: 3407 - DNA, 29 bp, Homo Sapiens
tgctaaaatgttttcattcctattagatc

SEQ ID NO: 3408 - DNA, 29 bp, Homo Sapiens
ctgctaaaatgttttcattcctattagat

SEQ ID NO: 3409 - DNA, 29 bp, Homo Sapiens
tctgctaaaatgttttcattcctattaga

SEQ ID NO: 3410 - DNA, 29 bp, Homo Sapiens
gtctgctaaaatgttttcattcctattag

SEQ ID NO: 3411 - DNA, 29 bp, Homo Sapiens
agtctgctaaaatgttttcattcctatta

SEQ ID NO: 3412 - DNA, 29 bp, Homo Sapiens
aagtctgctaaaatgttttcattcctatt

SEQ ID NO: 3413 - DNA, 29 bp, Homo Sapiens
aaagtctgctaaaatgttttcattcctat

SEQ ID NO: 3414 - DNA, 29 bp, Homo Sapiens
aaaagtctgctaaaatgttttcattccta

SEQ ID NO: 3415 - DNA, 29 bp, Homo Sapiens
aaaaagtctgctaaaatgttttcattcct

SEQ ID NO: 3416 - DNA, 29 bp, Homo Sapiens
taaaaagtctgctaaaatgttttcattcc

SEQ ID NO: 3417 - DNA, 29 bp, Homo Sapiens
ttaaaaagtctgctaaaatgttttcattc

SEQ ID NO: 3418 - DNA, 29 bp, Homo Sapiens
cttaaaaagtctgctaaaatgttttcatt

SEQ ID NO: 3419 - DNA, 29 bp, Homo Sapiens
gcttaaaaagtctgctaaaatgttttcat

SEQ ID NO: 3420 - DNA, 29 bp, Homo Sapiens
agcttaaaaagtctgctaaaatgttttca

SEQ ID NO: 3421 - DNA, 29 bp, Homo Sapiens
aagcttaaaaagtctgctaaaatgttttc

SEQ ID NO: 3422 - DNA, 29 bp, Homo Sapiens
aaagcttaaaaagtctgctaaaatgtttt

SEQ ID NO: 3423 - DNA, 29 bp, Homo Sapiens
gaaagcttaaaaagtctgctaaaatgttt

SEQ ID NO: 3424 - DNA, 29 bp, Homo Sapiens
agaaagcttaaaaagtctgctaaaatgtt

SEQ ID NO: 3425 - DNA, 29 bp, Homo Sapiens
aagaaagcttaaaaagtctgctaaaatgt

SEQ ID NO: 3426 - DNA, 29 bp, Homo Sapiens
aaagaaagcttaaaaagtctgctaaaatg

SEQ ID NO: 3427 - DNA, 29 bp, Homo Sapiens
taaagaaagcttaaaaagtctgctaaaat

SEQ ID NO: 3428 - DNA, 29 bp, Homo Sapiens
ctaaagaaagcttaaaaagtctgctaaaa

SEQ ID NO: 3429 - DNA, 29 bp, Homo Sapiens
tctaaagaaagcttaaaaagtctgctaaa

SEQ ID NO: 3430 - DNA, 29 bp, Homo Sapiens
ttctaaagaaagcttaaaaagtctgctaa

SEQ ID NO: 3431 - DNA, 29 bp, Homo Sapiens
cttctaaagaaagcttaaaaagtctgcta

SEQ ID NO: 3432 - DNA, 29 bp, Homo Sapiens
tcttctaaagaaagcttaaaaagtctgct

SEQ ID NO: 3433 - DNA, 29 bp, Homo Sapiens
ttcttctaaagaaagcttaaaaagtctgc

SEQ ID NO: 3434 - DNA, 29 bp, Homo Sapiens
attcttctaaagaaagcttaaaaagtctg

SEQ ID NO: 3435 - DNA, 29 bp, Homo Sapiens
tattcttctaaagaaagcttaaaaagtct

SEQ ID NO: 3436 - DNA, 29 bp, Homo Sapiens
atattcttctaaagaaagcttaaaaagtc

SEQ ID NO: 3437 - DNA, 29 bp, Homo Sapiens
aatattcttctaaagaaagcttaaaaagt

SEQ ID NO: 3438 - DNA, 29 bp, Homo Sapiens
aaatattcttctaaagaaagcttaaaaag

SEQ ID NO: 3439 - DNA, 29 bp, Homo Sapiens
gaaatattcttctaaagaaagcttaaaaa

SEQ ID NO: 3440 - DNA, 30 bp, Homo Sapiens
gccctacctcttttttctgtctgacagctg

SEQ ID NO: 3441 - DNA, 30 bp, Homo Sapiens
cgccctacctcttttttctgtctgacagct

SEQ ID NO: 3442 - DNA, 30 bp, Homo Sapiens
tcgccctacctcttttttctgtctgacagc

SEQ ID NO: 3443 - DNA, 30 bp, Homo Sapiens
gtcgccctacctcttttttctgtctgacag

SEQ ID NO: 3444 - DNA, 30 bp, Homo Sapiens
tgtcgccctacctcttttttctgtctgaca

SEQ ID NO: 3445 - DNA, 30 bp, Homo Sapiens
ctgtcgccctacctcttttttctgtctgac

SEQ ID NO: 3446 - DNA, 30 bp, Homo Sapiens
tctgtcgccctacctcttttttctgtctga

SEQ ID NO: 3447 - DNA, 30 bp, Homo Sapiens
atctgtcgccctacctcttttttctgtctg

SEQ ID NO: 3448 - DNA, 30 bp, Homo Sapiens
gatctgtcgccctacctcttttttctgtct

SEQ ID NO: 3449 - DNA, 30 bp, Homo Sapiens
agatctgtcgccctacctcttttttctgtc

SEQ ID NO: 3450 - DNA, 30 bp, Homo Sapiens
tagatctgtcgccctacctcttttttctgt

SEQ ID NO: 3451 - DNA, 30 bp, Homo Sapiens
ttagatctgtcgccctacctcttttttctg

SEQ ID NO: 3452 - DNA, 30 bp, Homo Sapiens
attagatctgtcgccctacctcttttttct

SEQ ID NO: 3453 - DNA, 30 bp, Homo Sapiens
tattagatctgtcgccctacctcttttttc

SEQ ID NO: 3454 - DNA, 30 bp, Homo Sapiens
ctattagatctgtcgccctacctctttttt

SEQ ID NO: 3455 - DNA, 30 bp, Homo Sapiens
cctattagatctgtcgccctacctcttttt

SEQ ID NO: 3456 - DNA, 30 bp, Homo Sapiens
tcctattagatctgtcgccctacctctttt

SEQ ID NO: 3457 - DNA, 30 bp, Homo Sapiens
ttcctattagatctgtcgccctacctcttt

SEQ ID NO: 3458 - DNA, 30 bp, Homo Sapiens
attcctattagatctgtcgccctacctctt

SEQ ID NO: 3459 - DNA, 30 bp, Homo Sapiens
cattcctattagatctgtcgccctacctct

SEQ ID NO: 3460 - DNA, 30 bp, Homo Sapiens
tcattcctattagatctgtcgccctacctc

SEQ ID NO: 3461 - DNA, 30 bp, Homo Sapiens
ttcattcctattagatctgtcgccctacct

SEQ ID NO: 3462 - DNA, 30 bp, Homo Sapiens
tttcattcctattagatctgtcgccctacc

SEQ ID NO: 3463 - DNA, 30 bp, Homo Sapiens
ttttcattcctattagatctgtcgccctac

SEQ ID NO: 3464 - DNA, 30 bp, Homo Sapiens
gttttcattcctattagatctgtcgcccta

SEQ ID NO: 3465 - DNA, 30 bp, Homo Sapiens
tgttttcattcctattagatctgtcgccct

SEQ ID NO: 3466 - DNA, 30 bp, Homo Sapiens
atgttttcattcctattagatctgtcgccc

SEQ ID NO: 3467 - DNA, 30 bp, Homo Sapiens
aatgttttcattcctattagatctgtcgcc

SEQ ID NO: 3468 - DNA, 30 bp, Homo Sapiens
aaatgttttcattcctattagatctgtcgc

SEQ ID NO: 3469 - DNA, 30 bp, Homo Sapiens
aaaatgttttcattcctattagatctgtcg

SEQ ID NO: 3470 - DNA, 30 bp, Homo Sapiens
taaaatgttttcattcctattagatctgtc

SEQ ID NO: 3471 - DNA, 30 bp, Homo Sapiens
ctaaaatgttttcattcctattagatctgt

SEQ ID NO: 3472 - DNA, 30 bp, Homo Sapiens
gctaaaatgttttcattcctattagatctg

SEQ ID NO: 3473 - DNA, 30 bp, Homo Sapiens
tgctaaaatgttttcattcctattagatct

SEQ ID NO: 3474 - DNA, 30 bp, Homo Sapiens
ctgctaaaatgttttcattcctattagatc

SEQ ID NO: 3475 - DNA, 30 bp, Homo Sapiens
tctgctaaaatgttttcattcctattagat

SEQ ID NO: 3476 - DNA, 30 bp, Homo Sapiens
gtctgctaaaatgttttcattcctattaga

SEQ ID NO: 3477 - DNA, 30 bp, Homo Sapiens
agtctgctaaaatgttttcattcctattag

SEQ ID NO: 3478 - DNA, 30 bp, Homo Sapiens
aagtctgctaaaatgttttcattcctatta

SEQ ID NO: 3479 - DNA, 30 bp, Homo Sapiens
aaagtctgctaaaatgttttcattcctatt

SEQ ID NO: 3480 - DNA, 30 bp, Homo Sapiens
aaaagtctgctaaaatgttttcattcctat

SEQ ID NO: 3481 - DNA, 30 bp, Homo Sapiens
aaaaagtctgctaaaatgttttcattccta

SEQ ID NO: 3482 - DNA, 30 bp, Homo Sapiens
taaaaagtctgctaaaatgttttcattcct

SEQ ID NO: 3483 - DNA, 30 bp, Homo Sapiens
ttaaaaagtctgctaaaatgttttcattcc

SEQ ID NO: 3484 - DNA, 30 bp, Homo Sapiens
cttaaaaagtctgctaaaatgttttcattc

SEQ ID NO: 3485 - DNA, 30 bp, Homo Sapiens
gcttaaaaagtctgctaaaatgttttcatt

SEQ ID NO: 3486 - DNA, 30 bp, Homo Sapiens
agcttaaaaagtctgctaaaatgttttcat

SEQ ID NO: 3487 - DNA, 30 bp, Homo Sapiens
aagcttaaaaagtctgctaaaatgttttca

SEQ ID NO: 3488 - DNA, 30 bp, Homo Sapiens
aaagcttaaaaagtctgctaaaatgttttc

SEQ ID NO: 3489 - DNA, 30 bp, Homo Sapiens
gaaagcttaaaaagtctgctaaaatgtttt

SEQ ID NO: 3490 - DNA, 30 bp, Homo Sapiens
agaaagcttaaaaagtctgctaaaatgttt

SEQ ID NO: 3491 - DNA, 30 bp, Homo Sapiens
aagaaagcttaaaaagtctgctaaaatgtt

SEQ ID NO: 3492 - DNA, 30 bp, Homo Sapiens
aaagaaagcttaaaaagtctgctaaaatgt

SEQ ID NO: 3493 - DNA, 30 bp, Homo Sapiens
taaagaaagcttaaaaagtctgctaaaatg

SEQ ID NO: 3494 - DNA, 30 bp, Homo Sapiens
ctaaagaaagcttaaaaagtctgctaaaat

SEQ ID NO: 3495 - DNA, 30 bp, Homo Sapiens
tctaaagaaagcttaaaaagtctgctaaaa

SEQ ID NO: 3496 - DNA, 30 bp, Homo Sapiens
ttctaaagaaagcttaaaaagtctgctaaa

SEQ ID NO: 3497 - DNA, 30 bp, Homo Sapiens
cttctaaagaaagcttaaaaagtctgctaa

SEQ ID NO: 3498 - DNA, 30 bp, Homo Sapiens
tcttctaaagaaagcttaaaaagtctgcta

SEQ ID NO: 3499 - DNA, 30 bp, Homo Sapiens
ttcttctaaagaaagcttaaaaagtctgct

SEQ ID NO: 3500 - DNA, 30 bp, Homo Sapiens
attcttctaaagaaagcttaaaaagtctgc

SEQ ID NO: 3501 - DNA, 30 bp, Homo Sapiens
tattcttctaaagaaagcttaaaaagtctg

SEQ ID NO: 3502 - DNA, 30 bp, Homo Sapiens
atattcttctaaagaaagcttaaaaagtct

SEQ ID NO: 3503 - DNA, 30 bp, Homo Sapiens
aatattcttctaaagaaagcttaaaaagtc

SEQ ID NO: 3504 - DNA, 30 bp, Homo Sapiens
aaatattcttctaaagaaagcttaaaaagt

SEQ ID NO: 3505 - DNA, 30 bp, Homo Sapiens
gaaatattcttctaaagaaagcttaaaaag

SEQ ID NO: 3506 - DNA, 30 bp, Homo Sapiens
tgaaatattcttctaaagaaagcttaaaaa

SEQ ID NO: 3507 - DNA, 15 bp, Homo Sapiens
acatttggtcctttg

SEQ ID NO: 3508 - DNA, 15 bp, Homo Sapiens
catttggtcctttgc

SEQ ID NO: 3509 - DNA, 15 bp, Homo Sapiens
atttggtcctttgca

SEQ ID NO: 3510 - DNA, 15 bp, Homo Sapiens
tttggtcctttgcag

SEQ ID NO: 3511 - DNA, 15 bp, Homo Sapiens
ttggtcctttgcagg

SEQ ID NO: 3512 - DNA, 15 bp, Homo Sapiens
tggtcctttgcaggg

SEQ ID NO: 3513 - DNA, 15 bp, Homo Sapiens
ggtcctttgcagggt

SEQ ID NO: 3514 - DNA, 15 bp, Homo Sapiens
gtcctttgcagggtg

SEQ ID NO: 3515 - DNA, 15 bp, Homo Sapiens
tcctttgcagggtga

SEQ ID NO: 3516 - DNA, 15 bp, Homo Sapiens
cctttgcagggtgag

SEQ ID NO: 3517 - DNA, 15 bp, Homo Sapiens
ctttgcagggtgagt

SEQ ID NO: 3518 - DNA, 15 bp, Homo Sapiens
tttgcagggtgagtg

SEQ ID NO: 3519 - DNA, 15 bp, Homo Sapiens
ttgcagggtgagtga

SEQ ID NO: 3520 - DNA, 15 bp, Homo Sapiens
tgcagggtgagtgag

SEQ ID NO: 3521 - DNA, 15 bp, Homo Sapiens
gcagggtgagtgagc

SEQ ID NO: 3522 - DNA, 15 bp, Homo Sapiens
cagggtgagtgagcg

SEQ ID NO: 3523 - DNA, 15 bp, Homo Sapiens
agggtgagtgagcga

SEQ ID NO: 3524 - DNA, 15 bp, Homo Sapiens
gggtgagtgagcgag

SEQ ID NO: 3525 - DNA, 15 bp, Homo Sapiens
ggtgagtgagcgaga

SEQ ID NO: 3526 - DNA, 15 bp, Homo Sapiens
gtgagtgagcgagag

SEQ ID NO: 3527 - DNA, 15 bp, Homo Sapiens
tgagtgagcgagagg

SEQ ID NO: 3528 - DNA, 15 bp, Homo Sapiens
gagtgagcgagaggc

SEQ ID NO: 3529 - DNA, 15 bp, Homo Sapiens
agtgagcgagaggct

SEQ ID NO: 3530 - DNA, 15 bp, Homo Sapiens
gtgagcgagaggctg

SEQ ID NO: 3531 - DNA, 15 bp, Homo Sapiens
tgagcgagaggctgc

SEQ ID NO: 3532 - DNA, 15 bp, Homo Sapiens
gagcgagaggctgct

SEQ ID NO: 3533 - DNA, 15 bp, Homo Sapiens
agcgagaggctgctt

SEQ ID NO: 3534 - DNA, 15 bp, Homo Sapiens
gcgagaggctgcttt

SEQ ID NO: 3535 - DNA, 15 bp, Homo Sapiens
cgagaggctgctttg

SEQ ID NO: 3536 - DNA, 15 bp, Homo Sapiens
gagaggctgctttgg

SEQ ID NO: 3537 - DNA, 15 bp, Homo Sapiens
agaggctgctttgga

SEQ ID NO: 3538 - DNA, 15 bp, Homo Sapiens
gaggctgctttggaa

SEQ ID NO: 3539 - DNA, 15 bp, Homo Sapiens
aggctgctttggaag

SEQ ID NO: 3540 - DNA, 15 bp, Homo Sapiens
ggctgctttggaaga

SEQ ID NO: 3541 - DNA, 15 bp, Homo Sapiens
gctgctttggaagaa

SEQ ID NO: 3542 - DNA, 15 bp, Homo Sapiens
ctgctttggaagaaa

SEQ ID NO: 3543 - DNA, 15 bp, Homo Sapiens
tgctttggaagaaac

SEQ ID NO: 3544 - DNA, 15 bp, Homo Sapiens
gctttggaagaaact

SEQ ID NO: 3545 - DNA, 15 bp, Homo Sapiens
ctttggaagaaactc

SEQ ID NO: 3546 - DNA, 15 bp, Homo Sapiens
tttggaagaaactca

SEQ ID NO: 3547 - DNA, 15 bp, Homo Sapiens
ttggaagaaactcat

SEQ ID NO: 3548 - DNA, 15 bp, Homo Sapiens
tggaagaaactcata

SEQ ID NO: 3549 - DNA, 16 bp, Homo Sapiens
aacatttggtcctttg

SEQ ID NO: 3550 - DNA, 16 bp, Homo Sapiens
acatttggtcctttgc

SEQ ID NO: 3551 - DNA, 16 bp, Homo Sapiens
catttggtcctttgca

SEQ ID NO: 3552 - DNA, 16 bp, Homo Sapiens
atttggtcctttgcag

SEQ ID NO: 3553 - DNA, 16 bp, Homo Sapiens
tttggtcctttgcagg

SEQ ID NO: 3554 - DNA, 16 bp, Homo Sapiens
ttggtcctttgcaggg

SEQ ID NO: 3555 - DNA, 16 bp, Homo Sapiens
tggtcctttgcagggt

SEQ ID NO: 3556 - DNA, 16 bp, Homo Sapiens
ggtcctttgcagggtg

SEQ ID NO: 3557 - DNA, 16 bp, Homo Sapiens
gtcctttgcagggtga

SEQ ID NO: 3558 - DNA, 16 bp, Homo Sapiens
tcctttgcagggtgag

SEQ ID NO: 3559 - DNA, 16 bp, Homo Sapiens
cctttgcagggtgagt

SEQ ID NO: 3560 - DNA, 16 bp, Homo Sapiens
ctttgcagggtgagtg

SEQ ID NO: 3561 - DNA, 16 bp, Homo Sapiens
tttgcagggtgagtga

SEQ ID NO: 3562 - DNA, 16 bp, Homo Sapiens
ttgcagggtgagtgag

SEQ ID NO: 3563 - DNA, 16 bp, Homo Sapiens
tgcagggtgagtgagc

SEQ ID NO: 3564 - DNA, 16 bp, Homo Sapiens
gcagggtgagtgagcg

SEQ ID NO: 3565 - DNA, 16 bp, Homo Sapiens
cagggtgagtgagcga

SEQ ID NO: 3566 - DNA, 16 bp, Homo Sapiens
agggtgagtgagcgag

SEQ ID NO: 3567 - DNA, 16 bp, Homo Sapiens
gggtgagtgagcgaga

SEQ ID NO: 3568 - DNA, 16 bp, Homo Sapiens
ggtgagtgagcgagag

SEQ ID NO: 3569 - DNA, 16 bp, Homo Sapiens
gtgagtgagcgagagg

SEQ ID NO: 3570 - DNA, 16 bp, Homo Sapiens
tgagtgagcgagaggc

SEQ ID NO: 3571 - DNA, 16 bp, Homo Sapiens
gagtgagcgagaggct

SEQ ID NO: 3572 - DNA, 16 bp, Homo Sapiens
agtgagcgagaggctg

SEQ ID NO: 3573 - DNA, 16 bp, Homo Sapiens
gtgagcgagaggctgc

SEQ ID NO: 3574 - DNA, 16 bp, Homo Sapiens
tgagcgagaggctgct

SEQ ID NO: 3575 - DNA, 16 bp, Homo Sapiens
gagcgagaggctgctt

SEQ ID NO: 3576 - DNA, 16 bp, Homo Sapiens
agcgagaggctgcttt

SEQ ID NO: 3577 - DNA, 16 bp, Homo Sapiens
gcgagaggctgctttg

SEQ ID NO: 3578 - DNA, 16 bp, Homo Sapiens
cgagaggctgctttgg

SEQ ID NO: 3579 - DNA, 16 bp, Homo Sapiens
gagaggctgctttgga

SEQ ID NO: 3580 - DNA, 16 bp, Homo Sapiens
agaggctgctttggaa

SEQ ID NO: 3581 - DNA, 16 bp, Homo Sapiens
gaggctgctttggaag

SEQ ID NO: 3582 - DNA, 16 bp, Homo Sapiens
aggctgctttggaaga

SEQ ID NO: 3583 - DNA, 16 bp, Homo Sapiens
ggctgctttggaagaa

SEQ ID NO: 3584 - DNA, 16 bp, Homo Sapiens
gctgctttggaagaaa

SEQ ID NO: 3585 - DNA, 16 bp, Homo Sapiens
ctgctttggaagaaac

SEQ ID NO: 3586 - DNA, 16 bp, Homo Sapiens
tgctttggaagaaact

SEQ ID NO: 3587 - DNA, 16 bp, Homo Sapiens
gctttggaagaaactc

SEQ ID NO: 3588 - DNA, 16 bp, Homo Sapiens
ctttggaagaaactca

SEQ ID NO: 3589 - DNA, 16 bp, Homo Sapiens
tttggaagaaactcat

SEQ ID NO: 3590 - DNA, 16 bp, Homo Sapiens
ttggaagaaactcata

SEQ ID NO: 3591 - DNA, 16 bp, Homo Sapiens
tggaagaaactcatag

SEQ ID NO: 3592 - DNA, 17 bp, Homo Sapiens
gaacatttggtcctttg

SEQ ID NO: 3593 - DNA, 17 bp, Homo Sapiens
aacatttggtcctttgc

SEQ ID NO: 3594 - DNA, 17 bp, Homo Sapiens
acatttggtcctttgca

SEQ ID NO: 3595 - DNA, 17 bp, Homo Sapiens
catttggtcctttgcag

SEQ ID NO: 3596 - DNA, 17 bp, Homo Sapiens
atttggtcctttgcagg

SEQ ID NO: 3597 - DNA, 17 bp, Homo Sapiens
tttggtcctttgcaggg

SEQ ID NO: 3598 - DNA, 17 bp, Homo Sapiens
ttggtcctttgcagggt

SEQ ID NO: 3599 - DNA, 17 bp, Homo Sapiens
tggtcctttgcagggtg

SEQ ID NO: 3600 - DNA, 17 bp, Homo Sapiens
ggtcctttgcagggtga

SEQ ID NO: 3601 - DNA, 17 bp, Homo Sapiens
gtcctttgcagggtgag

SEQ ID NO: 3602 - DNA, 17 bp, Homo Sapiens
tcctttgcagggtgagt

SEQ ID NO: 3603 - DNA, 17 bp, Homo Sapiens
cctttgcagggtgagtg

SEQ ID NO: 3604 - DNA, 17 bp, Homo Sapiens
ctttgcagggtgagtga

SEQ ID NO: 3605 - DNA, 17 bp, Homo Sapiens
tttgcagggtgagtgag

SEQ ID NO: 3606 - DNA, 17 bp, Homo Sapiens
ttgcagggtgagtgagc

SEQ ID NO: 3607 - DNA, 17 bp, Homo Sapiens
tgcagggtgagtgagcg

SEQ ID NO: 3608 - DNA, 17 bp, Homo Sapiens
gcagggtgagtgagcga

SEQ ID NO: 3609 - DNA, 17 bp, Homo Sapiens
cagggtgagtgagcgag

SEQ ID NO: 3610 - DNA, 17 bp, Homo Sapiens
agggtgagtgagcgaga

SEQ ID NO: 3611 - DNA, 17 bp, Homo Sapiens
gggtgagtgagcgagag

SEQ ID NO: 3612 - DNA, 17 bp, Homo Sapiens
ggtgagtgagcgagagg

SEQ ID NO: 3613 - DNA, 17 bp, Homo Sapiens
gtgagtgagcgagaggc

SEQ ID NO: 3614 - DNA, 17 bp, Homo Sapiens
tgagtgagcgagaggct

SEQ ID NO: 3615 - DNA, 17 bp, Homo Sapiens
gagtgagcgagaggctg

SEQ ID NO: 3616 - DNA, 17 bp, Homo Sapiens
agtgagcgagaggctgc

SEQ ID NO: 3617 - DNA, 17 bp, Homo Sapiens
gtgagcgagaggctgct

SEQ ID NO: 3618 - DNA, 17 bp, Homo Sapiens
tgagcgagaggctgctt

SEQ ID NO: 3619 - DNA, 17 bp, Homo Sapiens
gagcgagaggctgcttt

SEQ ID NO: 3620 - DNA, 17 bp, Homo Sapiens
agcgagaggctgctttg

SEQ ID NO: 3621 - DNA, 17 bp, Homo Sapiens
gcgagaggctgctttgg

SEQ ID NO: 3622 - DNA, 17 bp, Homo Sapiens
cgagaggctgctttgga

SEQ ID NO: 3623 - DNA, 17 bp, Homo Sapiens
gagaggctgctttggaa

SEQ ID NO: 3624 - DNA, 17 bp, Homo Sapiens
agaggctgctttggaag

SEQ ID NO: 3625 - DNA, 17 bp, Homo Sapiens
gaggctgctttggaaga

SEQ ID NO: 3626 - DNA, 17 bp, Homo Sapiens
aggctgctttggaagaa

SEQ ID NO: 3627 - DNA, 17 bp, Homo Sapiens
ggctgctttggaagaaa

SEQ ID NO: 3628 - DNA, 17 bp, Homo Sapiens
gctgctttggaagaaac

SEQ ID NO: 3629 - DNA, 17 bp, Homo Sapiens
ctgctttggaagaaact

SEQ ID NO: 3630 - DNA, 17 bp, Homo Sapiens
tgctttggaagaaactc

SEQ ID NO: 3631 - DNA, 17 bp, Homo Sapiens
gctttggaagaaactca

SEQ ID NO: 3632 - DNA, 17 bp, Homo Sapiens
ctttggaagaaactcat

SEQ ID NO: 3633 - DNA, 17 bp, Homo Sapiens
tttggaagaaactcata

SEQ ID NO: 3634 - DNA, 17 bp, Homo Sapiens
ttggaagaaactcatag

SEQ ID NO: 3635 - DNA, 17 bp, Homo Sapiens
tggaagaaactcataga

SEQ ID NO: 3636 - DNA, 18 bp, Homo Sapiens
tgaacatttggtcctttg

SEQ ID NO: 3637 - DNA, 18 bp, Homo Sapiens
gaacatttggtcctttgc

SEQ ID NO: 3638 - DNA, 18 bp, Homo Sapiens
aacatttggtcctttgca

SEQ ID NO: 3639 - DNA, 18 bp, Homo Sapiens
acatttggtcctttgcag

SEQ ID NO: 3640 - DNA, 18 bp, Homo Sapiens
catttggtcctttgcagg

SEQ ID NO: 3641 - DNA, 18 bp, Homo Sapiens
atttggtcctttgcaggg

SEQ ID NO: 3642 - DNA, 18 bp, Homo Sapiens
tttggtcctttgcagggt

SEQ ID NO: 3643 - DNA, 18 bp, Homo Sapiens
ttggtcctttgcagggtg

SEQ ID NO: 3644 - DNA, 18 bp, Homo Sapiens
tggtcctttgcagggtga

SEQ ID NO: 3645 - DNA, 18 bp, Homo Sapiens
ggtcctttgcagggtgag

SEQ ID NO: 3646 - DNA, 18 bp, Homo Sapiens
gtcctttgcagggtgagt

SEQ ID NO: 3647 - DNA, 18 bp, Homo Sapiens
tcctttgcagggtgagtg

SEQ ID NO: 3648 - DNA, 18 bp, Homo Sapiens
cctttgcagggtgagtga

SEQ ID NO: 3649 - DNA, 18 bp, Homo Sapiens
ctttgcagggtgagtgag

SEQ ID NO: 3650 - DNA, 18 bp, Homo Sapiens
tttgcagggtgagtgagc

SEQ ID NO: 3651 - DNA, 18 bp, Homo Sapiens
ttgcagggtgagtgagcg

SEQ ID NO: 3652 - DNA, 18 bp, Homo Sapiens
tgcagggtgagtgagcga

SEQ ID NO: 3653 - DNA, 18 bp, Homo Sapiens
gcagggtgagtgagcgag

SEQ ID NO: 3654 - DNA, 18 bp, Homo Sapiens
cagggtgagtgagcgaga

SEQ ID NO: 3655 - DNA, 18 bp, Homo Sapiens
agggtgagtgagcgagag

SEQ ID NO: 3656 - DNA, 18 bp, Homo Sapiens
gggtgagtgagcgagagg

SEQ ID NO: 3657 - DNA, 18 bp, Homo Sapiens
ggtgagtgagcgagaggc

SEQ ID NO: 3658 - DNA, 18 bp, Homo Sapiens
gtgagtgagcgagaggct

SEQ ID NO: 3659 - DNA, 18 bp, Homo Sapiens
tgagtgagcgagaggctg

SEQ ID NO: 3660 - DNA, 18 bp, Homo Sapiens
gagtgagcgagaggctgc

SEQ ID NO: 3661 - DNA, 18 bp, Homo Sapiens
agtgagcgagaggctgct

SEQ ID NO: 3662 - DNA, 18 bp, Homo Sapiens
gtgagcgagaggctgctt

SEQ ID NO: 3663 - DNA, 18 bp, Homo Sapiens
tgagcgagaggctgcttt

SEQ ID NO: 3664 - DNA, 18 bp, Homo Sapiens
gagcgagaggctgctttg

SEQ ID NO: 3665 - DNA, 18 bp, Homo Sapiens
agcgagaggctgctttgg

SEQ ID NO: 3666 - DNA, 18 bp, Homo Sapiens
gcgagaggctgctttgga

SEQ ID NO: 3667 - DNA, 18 bp, Homo Sapiens
cgagaggctgctttggaa

SEQ ID NO: 3668 - DNA, 18 bp, Homo Sapiens
gagaggctgctttggaag

SEQ ID NO: 3669 - DNA, 18 bp, Homo Sapiens
agaggctgctttggaaga

SEQ ID NO: 3670 - DNA, 18 bp, Homo Sapiens
gaggctgctttggaagaa

SEQ ID NO: 3671 - DNA, 18 bp, Homo Sapiens
aggctgctttggaagaaa

SEQ ID NO: 3672 - DNA, 18 bp, Homo Sapiens
ggctgctttggaagaaac

SEQ ID NO: 3673 - DNA, 18 bp, Homo Sapiens
gctgctttggaagaaact

SEQ ID NO: 3674 - DNA, 18 bp, Homo Sapiens
ctgctttggaagaaactc

SEQ ID NO: 3675 - DNA, 18 bp, Homo Sapiens
tgctttggaagaaactca

SEQ ID NO: 3676 - DNA, 18 bp, Homo Sapiens
gctttggaagaaactcat

SEQ ID NO: 3677 - DNA, 18 bp, Homo Sapiens
ctttggaagaaactcata

SEQ ID NO: 3678 - DNA, 18 bp, Homo Sapiens
tttggaagaaactcatag

SEQ ID NO: 3679 - DNA, 18 bp, Homo Sapiens
ttggaagaaactcataga

SEQ ID NO: 3680 - DNA, 18 bp, Homo Sapiens
tggaagaaactcatagat

SEQ ID NO: 3681 - DNA, 19 bp, Homo Sapiens
ctgaacatttggtcctttg

SEQ ID NO: 3682 - DNA, 19 bp, Homo Sapiens
tgaacatttggtcctttgc

SEQ ID NO: 3683 - DNA, 19 bp, Homo Sapiens
gaacatttggtcctttgca

SEQ ID NO: 3684 - DNA, 19 bp, Homo Sapiens
aacatttggtcctttgcag

SEQ ID NO: 3685 - DNA, 19 bp, Homo Sapiens
acatttggtcctttgcagg

SEQ ID NO: 3686 - DNA, 19 bp, Homo Sapiens
catttggtcctttgcaggg

SEQ ID NO: 3687 - DNA, 19 bp, Homo Sapiens
atttggtcctttgcagggt

SEQ ID NO: 3688 - DNA, 19 bp, Homo Sapiens
tttggtcctttgcagggtg

SEQ ID NO: 3689 - DNA, 19 bp, Homo Sapiens
ttggtcctttgcagggtga

SEQ ID NO: 3690 - DNA, 19 bp, Homo Sapiens
tggtcctttgcagggtgag

SEQ ID NO: 3691 - DNA, 19 bp, Homo Sapiens
ggtcctttgcagggtgagt

SEQ ID NO: 3692 - DNA, 19 bp, Homo Sapiens
gtcctttgcagggtgagtg

SEQ ID NO: 3693 - DNA, 19 bp, Homo Sapiens
tcctttgcagggtgagtga

SEQ ID NO: 3694 - DNA, 19 bp, Homo Sapiens
cctttgcagggtgagtgag

SEQ ID NO: 3695 - DNA, 19 bp, Homo Sapiens
ctttgcagggtgagtgagc

SEQ ID NO: 3696 - DNA, 19 bp, Homo Sapiens
tttgcagggtgagtgagcg

SEQ ID NO: 3697 - DNA, 19 bp, Homo Sapiens
ttgcagggtgagtgagcga

SEQ ID NO: 3698 - DNA, 19 bp, Homo Sapiens
tgcagggtgagtgagcgag

SEQ ID NO: 3699 - DNA, 19 bp, Homo Sapiens
gcagggtgagtgagcgaga

SEQ ID NO: 3700 - DNA, 19 bp, Homo Sapiens
cagggtgagtgagcgagag

SEQ ID NO: 3701 - DNA, 19 bp, Homo Sapiens
agggtgagtgagcgagagg

SEQ ID NO: 3702 - DNA, 19 bp, Homo Sapiens
gggtgagtgagcgagaggc

SEQ ID NO: 3703 - DNA, 19 bp, Homo Sapiens
ggtgagtgagcgagaggct

SEQ ID NO: 3704 - DNA, 19 bp, Homo Sapiens
gtgagtgagcgagaggctg

SEQ ID NO: 3705 - DNA, 19 bp, Homo Sapiens
tgagtgagcgagaggctgc

SEQ ID NO: 3706 - DNA, 19 bp, Homo Sapiens
gagtgagcgagaggctgct

SEQ ID NO: 3707 - DNA, 19 bp, Homo Sapiens
agtgagcgagaggctgctt

SEQ ID NO: 3708 - DNA, 19 bp, Homo Sapiens
gtgagcgagaggctgcttt

SEQ ID NO: 3709 - DNA, 19 bp, Homo Sapiens
tgagcgagaggctgctttg

SEQ ID NO: 3710 - DNA, 19 bp, Homo Sapiens
gagcgagaggctgctttgg

SEQ ID NO: 3711 - DNA, 19 bp, Homo Sapiens
agcgagaggctgctttgga

SEQ ID NO: 3712 - DNA, 19 bp, Homo Sapiens
gcgagaggctgctttggaa

SEQ ID NO: 3713 - DNA, 19 bp, Homo Sapiens
cgagaggctgctttggaag

SEQ ID NO: 3714 - DNA, 19 bp, Homo Sapiens
gagaggctgctttggaaga

SEQ ID NO: 3715 - DNA, 19 bp, Homo Sapiens
agaggctgctttggaagaa

SEQ ID NO: 3716 - DNA, 19 bp, Homo Sapiens
gaggctgctttggaagaaa

SEQ ID NO: 3717 - DNA, 19 bp, Homo Sapiens
aggctgctttggaagaaac

SEQ ID NO: 3718 - DNA, 19 bp, Homo Sapiens
ggctgctttggaagaaact

SEQ ID NO: 3719 - DNA, 19 bp, Homo Sapiens
gctgctttggaagaaactc

SEQ ID NO: 3720 - DNA, 19 bp, Homo Sapiens
ctgctttggaagaaactca

SEQ ID NO: 3721 - DNA, 19 bp, Homo Sapiens
tgctttggaagaaactcat

SEQ ID NO: 3722 - DNA, 19 bp, Homo Sapiens
gctttggaagaaactcata

SEQ ID NO: 3723 - DNA, 19 bp, Homo Sapiens
ctttggaagaaactcatag

SEQ ID NO: 3724 - DNA, 19 bp, Homo Sapiens
tttggaagaaactcataga

SEQ ID NO: 3725 - DNA, 19 bp, Homo Sapiens
ttggaagaaactcatagat

SEQ ID NO: 3726 - DNA, 19 bp, Homo Sapiens
tggaagaaactcatagatt

SEQ ID NO: 3727 - DNA, 20 bp, Homo Sapiens
tctgaacatttggtcctttg

SEQ ID NO: 3728 - DNA, 20 bp, Homo Sapiens
ctgaacatttggtcctttgc

SEQ ID NO: 3729 - DNA, 20 bp, Homo Sapiens
tgaacatttggtcctttgca

SEQ ID NO: 3730 - DNA, 20 bp, Homo Sapiens
gaacatttggtcctttgcag

SEQ ID NO: 3731 - DNA, 20 bp, Homo Sapiens
aacatttggtcctttgcagg

SEQ ID NO: 3732 - DNA, 20 bp, Homo Sapiens
acatttggtcctttgcaggg

SEQ ID NO: 3733 - DNA, 20 bp, Homo Sapiens
catttggtcctttgcagggt

SEQ ID NO: 3734 - DNA, 20 bp, Homo Sapiens
atttggtcctttgcagggtg

SEQ ID NO: 3735 - DNA, 20 bp, Homo Sapiens
tttggtcctttgcagggtga

SEQ ID NO: 3736 - DNA, 20 bp, Homo Sapiens
ttggtcctttgcagggtgag

SEQ ID NO: 3737 - DNA, 20 bp, Homo Sapiens
tggtcctttgcagggtgagt

SEQ ID NO: 3738 - DNA, 20 bp, Homo Sapiens
ggtcctttgcagggtgagtg

SEQ ID NO: 3739 - DNA, 20 bp, Homo Sapiens
gtcctttgcagggtgagtga

SEQ ID NO: 3740 - DNA, 20 bp, Homo Sapiens
tcctttgcagggtgagtgag

SEQ ID NO: 3741 - DNA, 20 bp, Homo Sapiens
cctttgcagggtgagtgagc

SEQ ID NO: 3742 - DNA, 20 bp, Homo Sapiens
ctttgcagggtgagtgagcg

SEQ ID NO: 3743 - DNA, 20 bp, Homo Sapiens
tttgcagggtgagtgagcga

SEQ ID NO: 3744 - DNA, 20 bp, Homo Sapiens
ttgcagggtgagtgagcgag

SEQ ID NO: 3745 - DNA, 20 bp, Homo Sapiens
tgcagggtgagtgagcgaga

SEQ ID NO: 3746 - DNA, 20 bp, Homo Sapiens
gcagggtgagtgagcgagag

SEQ ID NO: 3747 - DNA, 20 bp, Homo Sapiens
cagggtgagtgagcgagagg

SEQ ID NO: 3748 - DNA, 20 bp, Homo Sapiens
agggtgagtgagcgagaggc

SEQ ID NO: 3749 - DNA, 20 bp, Homo Sapiens
gggtgagtgagcgagaggct

SEQ ID NO: 3750 - DNA, 20 bp, Homo Sapiens
ggtgagtgagcgagaggctg

SEQ ID NO: 3751 - DNA, 20 bp, Homo Sapiens
gtgagtgagcgagaggctgc

SEQ ID NO: 3752 - DNA, 20 bp, Homo Sapiens
tgagtgagcgagaggctgct

SEQ ID NO: 3753 - DNA, 20 bp, Homo Sapiens
gagtgagcgagaggctgctt

SEQ ID NO: 3754 - DNA, 20 bp, Homo Sapiens
agtgagcgagaggctgcttt

SEQ ID NO: 3755 - DNA, 20 bp, Homo Sapiens
gtgagcgagaggctgctttg

SEQ ID NO: 3756 - DNA, 20 bp, Homo Sapiens
tgagcgagaggctgctttgg

SEQ ID NO: 3757 - DNA, 20 bp, Homo Sapiens
gagcgagaggctgctttgga

SEQ ID NO: 3758 - DNA, 20 bp, Homo Sapiens
agcgagaggctgctttggaa

SEQ ID NO: 3759 - DNA, 20 bp, Homo Sapiens
gcgagaggctgctttggaag

SEQ ID NO: 3760 - DNA, 20 bp, Homo Sapiens
cgagaggctgctttggaaga

SEQ ID NO: 3761 - DNA, 20 bp, Homo Sapiens
gagaggctgctttggaagaa

SEQ ID NO: 3762 - DNA, 20 bp, Homo Sapiens
agaggctgctttggaagaaa

SEQ ID NO: 3763 - DNA, 20 bp, Homo Sapiens
gaggctgctttggaagaaac

SEQ ID NO: 3764 - DNA, 20 bp, Homo Sapiens
aggctgctttggaagaaact

SEQ ID NO: 3765 - DNA, 20 bp, Homo Sapiens
ggctgctttggaagaaactc

SEQ ID NO: 3766 - DNA, 20 bp, Homo Sapiens
gctgctttggaagaaactca

SEQ ID NO: 3767 - DNA, 20 bp, Homo Sapiens
ctgctttggaagaaactcat

SEQ ID NO: 3768 - DNA, 20 bp, Homo Sapiens
tgctttggaagaaactcata

SEQ ID NO: 3769 - DNA, 20 bp, Homo Sapiens
gctttggaagaaactcatag

SEQ ID NO: 3770 - DNA, 20 bp, Homo Sapiens
ctttggaagaaactcataga

SEQ ID NO: 3771 - DNA, 20 bp, Homo Sapiens
tttggaagaaactcatagat

SEQ ID NO: 3772 - DNA, 20 bp, Homo Sapiens
ttggaagaaactcatagatt

SEQ ID NO: 3773 - DNA, 20 bp, Homo Sapiens
tggaagaaactcatagatta

SEQ ID NO: 3774 - DNA, 21 bp, Homo Sapiens
atctgaacatttggtcctttg

SEQ ID NO: 3775 - DNA, 21 bp, Homo Sapiens
tctgaacatttggtcctttgc

SEQ ID NO: 3776 - DNA, 21 bp, Homo Sapiens
ctgaacatttggtcctttgca

SEQ ID NO: 3777 - DNA, 21 bp, Homo Sapiens
tgaacatttggtcctttgcag

SEQ ID NO: 3778 - DNA, 21 bp, Homo Sapiens
gaacatttggtcctttgcagg

SEQ ID NO: 3779 - DNA, 21 bp, Homo Sapiens
aacatttggtcctttgcaggg

SEQ ID NO: 3780 - DNA, 21 bp, Homo Sapiens
acatttggtcctttgcagggt

SEQ ID NO: 3781 - DNA, 21 bp, Homo Sapiens
catttggtcctttgcagggtg

SEQ ID NO: 3782 - DNA, 21 bp, Homo Sapiens
atttggtcctttgcagggtga

SEQ ID NO: 3783 - DNA, 21 bp, Homo Sapiens
tttggtcctttgcagggtgag

SEQ ID NO: 3784 - DNA, 21 bp, Homo Sapiens
ttggtcctttgcagggtgagt

SEQ ID NO: 3785 - DNA, 21 bp, Homo Sapiens
tggtcctttgcagggtgagtg

SEQ ID NO: 3786 - DNA, 21 bp, Homo Sapiens
ggtcctttgcagggtgagtga

SEQ ID NO: 3787 - DNA, 21 bp, Homo Sapiens
gtcctttgcagggtgagtgag

SEQ ID NO: 3788 - DNA, 21 bp, Homo Sapiens
tcctttgcagggtgagtgagc

SEQ ID NO: 3789 - DNA, 21 bp, Homo Sapiens
cctttgcagggtgagtgagcg

SEQ ID NO: 3790 - DNA, 21 bp, Homo Sapiens
ctttgcagggtgagtgagcga

SEQ ID NO: 3791 - DNA, 21 bp, Homo Sapiens
tttgcagggtgagtgagcgag

SEQ ID NO: 3792 - DNA, 21 bp, Homo Sapiens
ttgcagggtgagtgagcgaga

SEQ ID NO: 3793 - DNA, 21 bp, Homo Sapiens
tgcagggtgagtgagcgagag

SEQ ID NO: 3794 - DNA, 21 bp, Homo Sapiens
gcagggtgagtgagcgagagg

SEQ ID NO: 3795 - DNA, 21 bp, Homo Sapiens
cagggtgagtgagcgagaggc

SEQ ID NO: 3796 - DNA, 21 bp, Homo Sapiens
agggtgagtgagcgagaggct

SEQ ID NO: 3797 - DNA, 21 bp, Homo Sapiens
gggtgagtgagcgagaggctg

SEQ ID NO: 3798 - DNA, 21 bp, Homo Sapiens
ggtgagtgagcgagaggctgc

SEQ ID NO: 3799 - DNA, 21 bp, Homo Sapiens
gtgagtgagcgagaggctgct

SEQ ID NO: 3800 - DNA, 21 bp, Homo Sapiens
tgagtgagcgagaggctgctt

SEQ ID NO: 3801 - DNA, 21 bp, Homo Sapiens
gagtgagcgagaggctgcttt

SEQ ID NO: 3802 - DNA, 21 bp, Homo Sapiens
agtgagcgagaggctgctttg

SEQ ID NO: 3803 - DNA, 21 bp, Homo Sapiens
gtgagcgagaggctgctttgg

SEQ ID NO: 3804 - DNA, 21 bp, Homo Sapiens
tgagcgagaggctgctttgga

SEQ ID NO: 3805 - DNA, 21 bp, Homo Sapiens
gagcgagaggctgctttggaa

SEQ ID NO: 3806 - DNA, 21 bp, Homo Sapiens
agcgagaggctgctttggaag

SEQ ID NO: 3807 - DNA, 21 bp, Homo Sapiens
gcgagaggctgctttggaaga

SEQ ID NO: 3808 - DNA, 21 bp, Homo Sapiens
cgagaggctgctttggaagaa

SEQ ID NO: 3809 - DNA, 21 bp, Homo Sapiens
gagaggctgctttggaagaaa

SEQ ID NO: 3810 - DNA, 21 bp, Homo Sapiens
agaggctgctttggaagaaac

SEQ ID NO: 3811 - DNA, 21 bp, Homo Sapiens
gaggctgctttggaagaaact

SEQ ID NO: 3812 - DNA, 21 bp, Homo Sapiens
aggctgctttggaagaaactc

SEQ ID NO: 3813 - DNA, 21 bp, Homo Sapiens
ggctgctttggaagaaactca

SEQ ID NO: 3814 - DNA, 21 bp, Homo Sapiens
gctgctttggaagaaactcat

SEQ ID NO: 3815 - DNA, 21 bp, Homo Sapiens
ctgctttggaagaaactcata

SEQ ID NO: 3816 - DNA, 21 bp, Homo Sapiens
tgctttggaagaaactcatag

SEQ ID NO: 3817 - DNA, 21 bp, Homo Sapiens
gctttggaagaaactcataga

SEQ ID NO: 3818 - DNA, 21 bp, Homo Sapiens
ctttggaagaaactcatagat

SEQ ID NO: 3819 - DNA, 21 bp, Homo Sapiens
tttggaagaaactcatagatt

SEQ ID NO: 3820 - DNA, 21 bp, Homo Sapiens
ttggaagaaactcatagatta

SEQ ID NO: 3821 - DNA, 21 bp, Homo Sapiens
tggaagaaactcatagattac

SEQ ID NO: 3822 - DNA, 22 bp, Homo Sapiens
catctgaacatttggtcctttg

SEQ ID NO: 3823 - DNA, 22 bp, Homo Sapiens
atctgaacatttggtcctttgc

SEQ ID NO: 3824 - DNA, 22 bp, Homo Sapiens
tctgaacatttggtcctttgca

SEQ ID NO: 3825 - DNA, 22 bp, Homo Sapiens
ctgaacatttggtcctttgcag

SEQ ID NO: 3826 - DNA, 22 bp, Homo Sapiens
tgaacatttggtcctttgcagg

SEQ ID NO: 3827 - DNA, 22 bp, Homo Sapiens
gaacatttggtcctttgcaggg

SEQ ID NO: 3828 - DNA, 22 bp, Homo Sapiens
aacatttggtcctttgcagggt

SEQ ID NO: 3829 - DNA, 22 bp, Homo Sapiens
acatttggtcctttgcagggtg

SEQ ID NO: 3830 - DNA, 22 bp, Homo Sapiens
catttggtcctttgcagggtga

SEQ ID NO: 3831 - DNA, 22 bp, Homo Sapiens
atttggtcctttgcagggtgag

SEQ ID NO: 3832 - DNA, 22 bp, Homo Sapiens
tttggtcctttgcagggtgagt

SEQ ID NO: 3833 - DNA, 22 bp, Homo Sapiens
ttggtcctttgcagggtgagtg

SEQ ID NO: 3834 - DNA, 22 bp, Homo Sapiens
tggtcctttgcagggtgagtga

SEQ ID NO: 3835 - DNA, 22 bp, Homo Sapiens
ggtcctttgcagggtgagtgag

SEQ ID NO: 3836 - DNA, 22 bp, Homo Sapiens
gtcctttgcagggtgagtgagc

SEQ ID NO: 3837 - DNA, 22 bp, Homo Sapiens
tcctttgcagggtgagtgagcg

SEQ ID NO: 3838 - DNA, 22 bp, Homo Sapiens
cctttgcagggtgagtgagcga

SEQ ID NO: 3839 - DNA, 22 bp, Homo Sapiens
ctttgcagggtgagtgagcgag

SEQ ID NO: 3840 - DNA, 22 bp, Homo Sapiens
tttgcagggtgagtgagcgaga

SEQ ID NO: 3841 - DNA, 22 bp, Homo Sapiens
ttgcagggtgagtgagcgagag

SEQ ID NO: 3842 - DNA, 22 bp, Homo Sapiens
tgcagggtgagtgagcgagagg

SEQ ID NO: 3843 - DNA, 22 bp, Homo Sapiens
gcagggtgagtgagcgagaggc

SEQ ID NO: 3844 - DNA, 22 bp, Homo Sapiens
cagggtgagtgagcgagaggct

SEQ ID NO: 3845 - DNA, 22 bp, Homo Sapiens
agggtgagtgagcgagaggctg

SEQ ID NO: 3846 - DNA, 22 bp, Homo Sapiens
gggtgagtgagcgagaggctgc

SEQ ID NO: 3847 - DNA, 22 bp, Homo Sapiens
ggtgagtgagcgagaggctgct

SEQ ID NO: 3848 - DNA, 22 bp, Homo Sapiens
gtgagtgagcgagaggctgctt

SEQ ID NO: 3849 - DNA, 22 bp, Homo Sapiens
tgagtgagcgagaggctgcttt

SEQ ID NO: 3850 - DNA, 22 bp, Homo Sapiens
gagtgagcgagaggctgctttg

SEQ ID NO: 3851 - DNA, 22 bp, Homo Sapiens
agtgagcgagaggctgctttgg

SEQ ID NO: 3852 - DNA, 22 bp, Homo Sapiens
gtgagcgagaggctgctttgga

SEQ ID NO: 3853 - DNA, 22 bp, Homo Sapiens
tgagcgagaggctgctttggaa

SEQ ID NO: 3854 - DNA, 22 bp, Homo Sapiens
gagcgagaggctgctttggaag

SEQ ID NO: 3855 - DNA, 22 bp, Homo Sapiens
agcgagaggctgctttggaaga

SEQ ID NO: 3856 - DNA, 22 bp, Homo Sapiens
gcgagaggctgctttggaagaa

SEQ ID NO: 3857 - DNA, 22 bp, Homo Sapiens
cgagaggctgctttggaagaaa

SEQ ID NO: 3858 - DNA, 22 bp, Homo Sapiens
gagaggctgctttggaagaaac

SEQ ID NO: 3859 - DNA, 22 bp, Homo Sapiens
agaggctgctttggaagaaact

SEQ ID NO: 3860 - DNA, 22 bp, Homo Sapiens
gaggctgctttggaagaaactc

SEQ ID NO: 3861 - DNA, 22 bp, Homo Sapiens
aggctgctttggaagaaactca

SEQ ID NO: 3862 - DNA, 22 bp, Homo Sapiens
ggctgctttggaagaaactcat

SEQ ID NO: 3863 - DNA, 22 bp, Homo Sapiens
gctgctttggaagaaactcata

SEQ ID NO: 3864 - DNA, 22 bp, Homo Sapiens
ctgctttggaagaaactcatag

SEQ ID NO: 3865 - DNA, 22 bp, Homo Sapiens
tgctttggaagaaactcataga

SEQ ID NO: 3866 - DNA, 22 bp, Homo Sapiens
gctttggaagaaactcatagat

SEQ ID NO: 3867 - DNA, 22 bp, Homo Sapiens
ctttggaagaaactcatagatt

SEQ ID NO: 3868 - DNA, 22 bp, Homo Sapiens
tttggaagaaactcatagatta

SEQ ID NO: 3869 - DNA, 22 bp, Homo Sapiens
ttggaagaaactcatagattac

SEQ ID NO: 3870 - DNA, 22 bp, Homo Sapiens
tggaagaaactcatagattact

SEQ ID NO: 3871 - DNA, 23 bp, Homo Sapiens
gcatctgaacatttggtcctttg

SEQ ID NO: 3872 - DNA, 23 bp, Homo Sapiens
catctgaacatttggtcctttgc

SEQ ID NO: 3873 - DNA, 23 bp, Homo Sapiens
atctgaacatttggtcctttgca

SEQ ID NO: 3874 - DNA, 23 bp, Homo Sapiens
tctgaacatttggtcctttgcag

SEQ ID NO: 3875 - DNA, 23 bp, Homo Sapiens
ctgaacatttggtcctttgcagg

SEQ ID NO: 3876 - DNA, 23 bp, Homo Sapiens
tgaacatttggtcctttgcaggg

SEQ ID NO: 3877 - DNA, 23 bp, Homo Sapiens
gaacatttggtcctttgcagggt

SEQ ID NO: 3878 - DNA, 23 bp, Homo Sapiens
aacatttggtcctttgcagggtg

SEQ ID NO: 3879 - DNA, 23 bp, Homo Sapiens
acatttggtcctttgcagggtga

SEQ ID NO: 3880 - DNA, 23 bp, Homo Sapiens
catttggtcctttgcagggtgag

SEQ ID NO: 3881 - DNA, 23 bp, Homo Sapiens
atttggtcctttgcagggtgagt

SEQ ID NO: 3882 - DNA, 23 bp, Homo Sapiens
tttggtcctttgcagggtgagtg

SEQ ID NO: 3883 - DNA, 23 bp, Homo Sapiens
ttggtcctttgcagggtgagtga

SEQ ID NO: 3884 - DNA, 23 bp, Homo Sapiens
tggtcctttgcagggtgagtgag

SEQ ID NO: 3885 - DNA, 23 bp, Homo Sapiens
ggtcctttgcagggtgagtgagc

SEQ ID NO: 3886 - DNA, 23 bp, Homo Sapiens
gtcctttgcagggtgagtgagcg

SEQ ID NO: 3887 - DNA, 23 bp, Homo Sapiens
tcctttgcagggtgagtgagcga

SEQ ID NO: 3888 - DNA, 23 bp, Homo Sapiens
cctttgcagggtgagtgagcgag

SEQ ID NO: 3889 - DNA, 23 bp, Homo Sapiens
ctttgcagggtgagtgagcgaga

SEQ ID NO: 3890 - DNA, 23 bp, Homo Sapiens
tttgcagggtgagtgagcgagag

SEQ ID NO: 3891 - DNA, 23 bp, Homo Sapiens
ttgcagggtgagtgagcgagagg

SEQ ID NO: 3892 - DNA, 23 bp, Homo Sapiens
tgcagggtgagtgagcgagaggc

SEQ ID NO: 3893 - DNA, 23 bp, Homo Sapiens
gcagggtgagtgagcgagaggct

SEQ ID NO: 3894 - DNA, 23 bp, Homo Sapiens
cagggtgagtgagcgagaggctg

SEQ ID NO: 3895 - DNA, 23 bp, Homo Sapiens
agggtgagtgagcgagaggctgc

SEQ ID NO: 3896 - DNA, 23 bp, Homo Sapiens
gggtgagtgagcgagaggctgct

SEQ ID NO: 3897 - DNA, 23 bp, Homo Sapiens
ggtgagtgagcgagaggctgctt

SEQ ID NO: 3898 - DNA, 23 bp, Homo Sapiens
gtgagtgagcgagaggctgcttt

SEQ ID NO: 3899 - DNA, 23 bp, Homo Sapiens
tgagtgagcgagaggctgctttg

SEQ ID NO: 3900 - DNA, 23 bp, Homo Sapiens
gagtgagcgagaggctgctttgg

SEQ ID NO: 3901 - DNA, 23 bp, Homo Sapiens
agtgagcgagaggctgctttgga

SEQ ID NO: 3902 - DNA, 23 bp, Homo Sapiens
gtgagcgagaggctgctttggaa

SEQ ID NO: 3903 - DNA, 23 bp, Homo Sapiens
tgagcgagaggctgctttggaag

SEQ ID NO: 3904 - DNA, 23 bp, Homo Sapiens
gagcgagaggctgctttggaaga

SEQ ID NO: 3905 - DNA, 23 bp, Homo Sapiens
agcgagaggctgctttggaagaa

SEQ ID NO: 3906 - DNA, 23 bp, Homo Sapiens
gcgagaggctgctttggaagaaa

SEQ ID NO: 3907 - DNA, 23 bp, Homo Sapiens
cgagaggctgctttggaagaaac

SEQ ID NO: 3908 - DNA, 23 bp, Homo Sapiens
gagaggctgctttggaagaaact

SEQ ID NO: 3909 - DNA, 23 bp, Homo Sapiens
agaggctgctttggaagaaactc

SEQ ID NO: 3910 - DNA, 23 bp, Homo Sapiens
gaggctgctttggaagaaactca

SEQ ID NO: 3911 - DNA, 23 bp, Homo Sapiens
aggctgctttggaagaaactcat

SEQ ID NO: 3912 - DNA, 23 bp, Homo Sapiens
ggctgctttggaagaaactcata

SEQ ID NO: 3913 - DNA, 23 bp, Homo Sapiens
gctgctttggaagaaactcatag

SEQ ID NO: 3914 - DNA, 23 bp, Homo Sapiens
ctgctttggaagaaactcataga

SEQ ID NO: 3915 - DNA, 23 bp, Homo Sapiens
tgctttggaagaaactcatagat

SEQ ID NO: 3916 - DNA, 23 bp, Homo Sapiens
gctttggaagaaactcatagatt

SEQ ID NO: 3917 - DNA, 23 bp, Homo Sapiens
ctttggaagaaactcatagatta

SEQ ID NO: 3918 - DNA, 23 bp, Homo Sapiens
tttggaagaaactcatagattac

SEQ ID NO: 3919 - DNA, 23 bp, Homo Sapiens
ttggaagaaactcatagattact

SEQ ID NO: 3920 - DNA, 23 bp, Homo Sapiens
tggaagaaactcatagattactg

SEQ ID NO: 3921 - DNA, 24 bp, Homo Sapiens
tgcatctgaacatttggtcctttg

SEQ ID NO: 3922 - DNA, 24 bp, Homo Sapiens
gcatctgaacatttggtcctttgc

SEQ ID NO: 3923 - DNA, 24 bp, Homo Sapiens
catctgaacatttggtcctttgca

SEQ ID NO: 3924 - DNA, 24 bp, Homo Sapiens
atctgaacatttggtcctttgcag

SEQ ID NO: 3925 - DNA, 24 bp, Homo Sapiens
tctgaacatttggtcctttgcagg

SEQ ID NO: 3926 - DNA, 24 bp, Homo Sapiens
ctgaacatttggtcctttgcaggg

SEQ ID NO: 3927 - DNA, 24 bp, Homo Sapiens
tgaacatttggtcctttgcagggt

SEQ ID NO: 3928 - DNA, 24 bp, Homo Sapiens
gaacatttggtcctttgcagggtg

SEQ ID NO: 3929 - DNA, 24 bp, Homo Sapiens
aacatttggtcctttgcagggtga

SEQ ID NO: 3930 - DNA, 24 bp, Homo Sapiens
acatttggtcctttgcagggtgag

SEQ ID NO: 3931 - DNA, 24 bp, Homo Sapiens
catttggtcctttgcagggtgagt

SEQ ID NO: 3932 - DNA, 24 bp, Homo Sapiens
atttggtcctttgcagggtgagtg

SEQ ID NO: 3933 - DNA, 24 bp, Homo Sapiens
tttggtcctttgcagggtgagtga

SEQ ID NO: 3934 - DNA, 24 bp, Homo Sapiens
ttggtcctttgcagggtgagtgag

SEQ ID NO: 3935 - DNA, 24 bp, Homo Sapiens
tggtcctttgcagggtgagtgagc

SEQ ID NO: 3936 - DNA, 24 bp, Homo Sapiens
ggtcctttgcagggtgagtgagcg

SEQ ID NO: 3937 - DNA, 24 bp, Homo Sapiens
gtcctttgcagggtgagtgagcga

SEQ ID NO: 3938 - DNA, 24 bp, Homo Sapiens
tcctttgcagggtgagtgagcgag

SEQ ID NO: 3939 - DNA, 24 bp, Homo Sapiens
cctttgcagggtgagtgagcgaga

SEQ ID NO: 3940 - DNA, 24 bp, Homo Sapiens
ctttgcagggtgagtgagcgagag

SEQ ID NO: 3941 - DNA, 24 bp, Homo Sapiens
tttgcagggtgagtgagcgagagg

SEQ ID NO: 3942 - DNA, 24 bp, Homo Sapiens
ttgcagggtgagtgagcgagaggc

SEQ ID NO: 3943 - DNA, 24 bp, Homo Sapiens
tgcagggtgagtgagcgagaggct

SEQ ID NO: 3944 - DNA, 24 bp, Homo Sapiens
gcagggtgagtgagcgagaggctg

SEQ ID NO: 3945 - DNA, 24 bp, Homo Sapiens
cagggtgagtgagcgagaggctgc

SEQ ID NO: 3946 - DNA, 24 bp, Homo Sapiens
agggtgagtgagcgagaggctgct

SEQ ID NO: 3947 - DNA, 24 bp, Homo Sapiens
gggtgagtgagcgagaggctgctt

SEQ ID NO: 3948 - DNA, 24 bp, Homo Sapiens
ggtgagtgagcgagaggctgcttt

SEQ ID NO: 3949 - DNA, 24 bp, Homo Sapiens
gtgagtgagcgagaggctgctttg

SEQ ID NO: 3950 - DNA, 24 bp, Homo Sapiens
tgagtgagcgagaggctgctttgg

SEQ ID NO: 3951 - DNA, 24 bp, Homo Sapiens
gagtgagcgagaggctgctttgga

SEQ ID NO: 3952 - DNA, 24 bp, Homo Sapiens
agtgagcgagaggctgctttggaa

SEQ ID NO: 3953 - DNA, 24 bp, Homo Sapiens
gtgagcgagaggctgctttggaag

SEQ ID NO: 3954 - DNA, 24 bp, Homo Sapiens
tgagcgagaggctgctttggaaga

SEQ ID NO: 3955 - DNA, 24 bp, Homo Sapiens
gagcgagaggctgctttggaagaa

SEQ ID NO: 3956 - DNA, 24 bp, Homo Sapiens
agcgagaggctgctttggaagaaa

SEQ ID NO: 3957 - DNA, 24 bp, Homo Sapiens
gcgagaggctgctttggaagaaac

SEQ ID NO: 3958 - DNA, 24 bp, Homo Sapiens
cgagaggctgctttggaagaaact

SEQ ID NO: 3959 - DNA, 24 bp, Homo Sapiens
gagaggctgctttggaagaaactc

SEQ ID NO: 3960 - DNA, 24 bp, Homo Sapiens
agaggctgctttggaagaaactca

SEQ ID NO: 3961 - DNA, 24 bp, Homo Sapiens
gaggctgctttggaagaaactcat

SEQ ID NO: 3962 - DNA, 24 bp, Homo Sapiens
aggctgctttggaagaaactcata

SEQ ID NO: 3963 - DNA, 24 bp, Homo Sapiens
ggctgctttggaagaaactcatag

SEQ ID NO: 3964 - DNA, 24 bp, Homo Sapiens
gctgctttggaagaaactcataga

SEQ ID NO: 3965 - DNA, 24 bp, Homo Sapiens
ctgctttggaagaaactcatagat

SEQ ID NO: 3966 - DNA, 24 bp, Homo Sapiens
tgctttggaagaaactcatagatt

SEQ ID NO: 3967 - DNA, 24 bp, Homo Sapiens
gctttggaagaaactcatagatta

SEQ ID NO: 3968 - DNA, 24 bp, Homo Sapiens
ctttggaagaaactcatagattac

SEQ ID NO: 3969 - DNA, 24 bp, Homo Sapiens
tttggaagaaactcatagattact

SEQ ID NO: 3970 - DNA, 24 bp, Homo Sapiens
ttggaagaaactcatagattactg

SEQ ID NO: 3971 - DNA, 24 bp, Homo Sapiens
tggaagaaactcatagattactgc

SEQ ID NO: 3972 - DNA, 25 bp, Homo Sapiens
ttgcatctgaacatttggtcctttg

SEQ ID NO: 3973 - DNA, 25 bp, Homo Sapiens
tgcatctgaacatttggtcctttgc

SEQ ID NO: 3974 - DNA, 25 bp, Homo Sapiens
gcatctgaacatttggtcctttgca

SEQ ID NO: 3975 - DNA, 25 bp, Homo Sapiens
catctgaacatttggtcctttgcag

SEQ ID NO: 3976 - DNA, 25 bp, Homo Sapiens
atctgaacatttggtcctttgcagg

SEQ ID NO: 3977 - DNA, 25 bp, Homo Sapiens
tctgaacatttggtcctttgcaggg

SEQ ID NO: 3978 - DNA, 25 bp, Homo Sapiens
ctgaacatttggtcctttgcagggt

SEQ ID NO: 3979 - DNA, 25 bp, Homo Sapiens
tgaacatttggtcctttgcagggtg

SEQ ID NO: 3980 - DNA, 25 bp, Homo Sapiens
gaacatttggtcctttgcagggtga

SEQ ID NO: 3981 - DNA, 25 bp, Homo Sapiens
aacatttggtcctttgcagggtgag

SEQ ID NO: 3982 - DNA, 25 bp, Homo Sapiens
acatttggtcctttgcagggtgagt

SEQ ID NO: 3983 - DNA, 25 bp, Homo Sapiens
catttggtcctttgcagggtgagtg

SEQ ID NO: 3984 - DNA, 25 bp, Homo Sapiens
atttggtcctttgcagggtgagtga

SEQ ID NO: 3985 - DNA, 25 bp, Homo Sapiens
tttggtcctttgcagggtgagtgag

SEQ ID NO: 3986 - DNA, 25 bp, Homo Sapiens
ttggtcctttgcagggtgagtgagc

SEQ ID NO: 3987 - DNA, 25 bp, Homo Sapiens
tggtcctttgcagggtgagtgagcg

SEQ ID NO: 3988 - DNA, 25 bp, Homo Sapiens
ggtcctttgcagggtgagtgagcga

SEQ ID NO: 3989 - DNA, 25 bp, Homo Sapiens
gtcctttgcagggtgagtgagcgag

SEQ ID NO: 3990 - DNA, 25 bp, Homo Sapiens
tcctttgcagggtgagtgagcgaga

SEQ ID NO: 3991 - DNA, 25 bp, Homo Sapiens
cctttgcagggtgagtgagcgagag

SEQ ID NO: 3992 - DNA, 25 bp, Homo Sapiens
ctttgcagggtgagtgagcgagagg

SEQ ID NO: 3993 - DNA, 25 bp, Homo Sapiens
tttgcagggtgagtgagcgagaggc

SEQ ID NO: 3994 - DNA, 25 bp, Homo Sapiens
ttgcagggtgagtgagcgagaggct

SEQ ID NO: 3995 - DNA, 25 bp, Homo Sapiens
tgcagggtgagtgagcgagaggctg

SEQ ID NO: 3996 - DNA, 25 bp, Homo Sapiens
gcagggtgagtgagcgagaggctgc

SEQ ID NO: 3997 - DNA, 25 bp, Homo Sapiens
cagggtgagtgagcgagaggctgct

SEQ ID NO: 3998 - DNA, 25 bp, Homo Sapiens
agggtgagtgagcgagaggctgctt

SEQ ID NO: 3999 - DNA, 25 bp, Homo Sapiens
gggtgagtgagcgagaggctgcttt

SEQ ID NO: 4000 - DNA, 25 bp, Homo Sapiens
ggtgagtgagcgagaggctgctttg

SEQ ID NO: 4001 - DNA, 25 bp, Homo Sapiens
gtgagtgagcgagaggctgctttgg

SEQ ID NO: 4002 - DNA, 25 bp, Homo Sapiens
tgagtgagcgagaggctgctttgga

SEQ ID NO: 4003 - DNA, 25 bp, Homo Sapiens
gagtgagcgagaggctgctttggaa

SEQ ID NO: 4004 - DNA, 25 bp, Homo Sapiens
agtgagcgagaggctgctttggaag

SEQ ID NO: 4005 - DNA, 25 bp, Homo Sapiens
gtgagcgagaggctgctttggaaga

SEQ ID NO: 4006 - DNA, 25 bp, Homo Sapiens
tgagcgagaggctgctttggaagaa

SEQ ID NO: 4007 - DNA, 25 bp, Homo Sapiens
gagcgagaggctgctttggaagaaa

SEQ ID NO: 4008 - DNA, 25 bp, Homo Sapiens
agcgagaggctgctttggaagaaac

SEQ ID NO: 4009 - DNA, 25 bp, Homo Sapiens
gcgagaggctgctttggaagaaact

SEQ ID NO: 4010 - DNA, 25 bp, Homo Sapiens
cgagaggctgctttggaagaaactc

SEQ ID NO: 4011 - DNA, 25 bp, Homo Sapiens
gagaggctgctttggaagaaactca

SEQ ID NO: 4012 - DNA, 25 bp, Homo Sapiens
agaggctgctttggaagaaactcat

SEQ ID NO: 4013 - DNA, 25 bp, Homo Sapiens
gaggctgctttggaagaaactcata

SEQ ID NO: 4014 - DNA, 25 bp, Homo Sapiens
aggctgctttggaagaaactcatag

SEQ ID NO: 4015 - DNA, 25 bp, Homo Sapiens
ggctgctttggaagaaactcataga

SEQ ID NO: 4016 - DNA, 25 bp, Homo Sapiens
gctgctttggaagaaactcatagat

SEQ ID NO: 4017 - DNA, 25 bp, Homo Sapiens
ctgctttggaagaaactcatagatt

SEQ ID NO: 4018 - DNA, 25 bp, Homo Sapiens
tgctttggaagaaactcatagatta

SEQ ID NO: 4019 - DNA, 25 bp, Homo Sapiens
gctttggaagaaactcatagattac

SEQ ID NO: 4020 - DNA, 25 bp, Homo Sapiens
ctttggaagaaactcatagattact

SEQ ID NO: 4021 - DNA, 25 bp, Homo Sapiens
tttggaagaaactcatagattactg

SEQ ID NO: 4022 - DNA, 25 bp, Homo Sapiens
ttggaagaaactcatagattactgc

SEQ ID NO: 4023 - DNA, 25 bp, Homo Sapiens
tggaagaaactcatagattactgca

SEQ ID NO: 4024 - DNA, 26 bp, Homo Sapiens
attgcatctgaacatttggtcctttg

SEQ ID NO: 4025 - DNA, 26 bp, Homo Sapiens
ttgcatctgaacatttggtcctttgc

SEQ ID NO: 4026 - DNA, 26 bp, Homo Sapiens
tgcatctgaacatttggtcctttgca

SEQ ID NO: 4027 - DNA, 26 bp, Homo Sapiens
gcatctgaacatttggtcctttgcag

SEQ ID NO: 4028 - DNA, 26 bp, Homo Sapiens
catctgaacatttggtcctttgcagg

SEQ ID NO: 4029 - DNA, 26 bp, Homo Sapiens
atctgaacatttggtcctttgcaggg

SEQ ID NO: 4030 - DNA, 26 bp, Homo Sapiens
tctgaacatttggtcctttgcagggt

SEQ ID NO: 4031 - DNA, 26 bp, Homo Sapiens
ctgaacatttggtcctttgcagggtg

SEQ ID NO: 4032 - DNA, 26 bp, Homo Sapiens
tgaacatttggtcctttgcagggtga

SEQ ID NO: 4033 - DNA, 26 bp, Homo Sapiens
gaacatttggtcctttgcagggtgag

SEQ ID NO: 4034 - DNA, 26 bp, Homo Sapiens
aacatttggtcctttgcagggtgagt

SEQ ID NO: 4035 - DNA, 26 bp, Homo Sapiens
acatttggtcctttgcagggtgagtg

SEQ ID NO: 4036 - DNA, 26 bp, Homo Sapiens
catttggtcctttgcagggtgagtga

SEQ ID NO: 4037 - DNA, 26 bp, Homo Sapiens
atttggtcctttgcagggtgagtgag

SEQ ID NO: 4038 - DNA, 26 bp, Homo Sapiens
tttggtcctttgcagggtgagtgagc

SEQ ID NO: 4039 - DNA, 26 bp, Homo Sapiens
ttggtcctttgcagggtgagtgagcg

SEQ ID NO: 4040 - DNA, 26 bp, Homo Sapiens
tggtcctttgcagggtgagtgagcga

SEQ ID NO: 4041 - DNA, 26 bp, Homo Sapiens
ggtcctttgcagggtgagtgagcgag

SEQ ID NO: 4042 - DNA, 26 bp, Homo Sapiens
gtcctttgcagggtgagtgagcgaga

SEQ ID NO: 4043 - DNA, 26 bp, Homo Sapiens
tcctttgcagggtgagtgagcgagag

SEQ ID NO: 4044 - DNA, 26 bp, Homo Sapiens
cctttgcagggtgagtgagcgagagg

SEQ ID NO: 4045 - DNA, 26 bp, Homo Sapiens
ctttgcagggtgagtgagcgagaggc

SEQ ID NO: 4046 - DNA, 26 bp, Homo Sapiens
tttgcagggtgagtgagcgagaggct

SEQ ID NO: 4047 - DNA, 26 bp, Homo Sapiens
ttgcagggtgagtgagcgagaggctg

SEQ ID NO: 4048 - DNA, 26 bp, Homo Sapiens
tgcagggtgagtgagcgagaggctgc

SEQ ID NO: 4049 - DNA, 26 bp, Homo Sapiens
gcagggtgagtgagcgagaggctgct

SEQ ID NO: 4050 - DNA, 26 bp, Homo Sapiens
cagggtgagtgagcgagaggctgctt

SEQ ID NO: 4051 - DNA, 26 bp, Homo Sapiens
agggtgagtgagcgagaggctgcttt

SEQ ID NO: 4052 - DNA, 26 bp, Homo Sapiens
gggtgagtgagcgagaggctgctttg

SEQ ID NO: 4053 - DNA, 26 bp, Homo Sapiens
ggtgagtgagcgagaggctgctttgg

SEQ ID NO: 4054 - DNA, 26 bp, Homo Sapiens
gtgagtgagcgagaggctgctttgga

SEQ ID NO: 4055 - DNA, 26 bp, Homo Sapiens
tgagtgagcgagaggctgctttggaa

SEQ ID NO: 4056 - DNA, 26 bp, Homo Sapiens
gagtgagcgagaggctgctttggaag

SEQ ID NO: 4057 - DNA, 26 bp, Homo Sapiens
agtgagcgagaggctgctttggaaga

SEQ ID NO: 4058 - DNA, 26 bp, Homo Sapiens
gtgagcgagaggctgctttggaagaa

SEQ ID NO: 4059 - DNA, 26 bp, Homo Sapiens
tgagcgagaggctgctttggaagaaa

SEQ ID NO: 4060 - DNA, 26 bp, Homo Sapiens
gagcgagaggctgctttggaagaaac

SEQ ID NO: 4061 - DNA, 26 bp, Homo Sapiens
agcgagaggctgctttggaagaaact

SEQ ID NO: 4062 - DNA, 26 bp, Homo Sapiens
gcgagaggctgctttggaagaaactc

SEQ ID NO: 4063 - DNA, 26 bp, Homo Sapiens
cgagaggctgctttggaagaaactca

SEQ ID NO: 4064 - DNA, 26 bp, Homo Sapiens
gagaggctgctttggaagaaactcat

SEQ ID NO: 4065 - DNA, 26 bp, Homo Sapiens
agaggctgctttggaagaaactcata

SEQ ID NO: 4066 - DNA, 26 bp, Homo Sapiens
gaggctgctttggaagaaactcatag

SEQ ID NO: 4067 - DNA, 26 bp, Homo Sapiens
aggctgctttggaagaaactcataga

SEQ ID NO: 4068 - DNA, 26 bp, Homo Sapiens
ggctgctttggaagaaactcatagat

SEQ ID NO: 4069 - DNA, 26 bp, Homo Sapiens
gctgctttggaagaaactcatagatt

SEQ ID NO: 4070 - DNA, 26 bp, Homo Sapiens
ctgctttggaagaaactcatagatta

SEQ ID NO: 4071 - DNA, 26 bp, Homo Sapiens
tgctttggaagaaactcatagattac

SEQ ID NO: 4072 - DNA, 26 bp, Homo Sapiens
gctttggaagaaactcatagattact

SEQ ID NO: 4073 - DNA, 26 bp, Homo Sapiens
ctttggaagaaactcatagattactg

SEQ ID NO: 4074 - DNA, 26 bp, Homo Sapiens
tttggaagaaactcatagattactgc

SEQ ID NO: 4075 - DNA, 26 bp, Homo Sapiens
ttggaagaaactcatagattactgca

SEQ ID NO: 4076 - DNA, 26 bp, Homo Sapiens
tggaagaaactcatagattactgcaa

SEQ ID NO: 4077 - DNA, 27 bp, Homo Sapiens
aattgcatctgaacatttggtcctttg

SEQ ID NO: 4078 - DNA, 27 bp, Homo Sapiens
attgcatctgaacatttggtcctttgc

SEQ ID NO: 4079 - DNA, 27 bp, Homo Sapiens
ttgcatctgaacatttggtcctttgca

SEQ ID NO: 4080 - DNA, 27 bp, Homo Sapiens
tgcatctgaacatttggtcctttgcag

SEQ ID NO: 4081 - DNA, 27 bp, Homo Sapiens
gcatctgaacatttggtcctttgcagg

SEQ ID NO: 4082 - DNA, 27 bp, Homo Sapiens
catctgaacatttggtcctttgcaggg

SEQ ID NO: 4083 - DNA, 27 bp, Homo Sapiens
atctgaacatttggtcctttgcagggt

SEQ ID NO: 4084 - DNA, 27 bp, Homo Sapiens
tctgaacatttggtcctttgcagggtg

SEQ ID NO: 4085 - DNA, 27 bp, Homo Sapiens
ctgaacatttggtcctttgcagggtga

SEQ ID NO: 4086 - DNA, 27 bp, Homo Sapiens
tgaacatttggtcctttgcagggtgag

SEQ ID NO: 4087 - DNA, 27 bp, Homo Sapiens
gaacatttggtcctttgcagggtgagt

SEQ ID NO: 4088 - DNA, 27 bp, Homo Sapiens
aacatttggtcctttgcagggtgagtg

SEQ ID NO: 4089 - DNA, 27 bp, Homo Sapiens
acatttggtcctttgcagggtgagtga

SEQ ID NO: 4090 - DNA, 27 bp, Homo Sapiens
catttggtcctttgcagggtgagtgag

SEQ ID NO: 4091 - DNA, 27 bp, Homo Sapiens
atttggtcctttgcagggtgagtgagc

SEQ ID NO: 4092 - DNA, 27 bp, Homo Sapiens
tttggtcctttgcagggtgagtgagcg

SEQ ID NO: 4093 - DNA, 27 bp, Homo Sapiens
ttggtcctttgcagggtgagtgagcga

SEQ ID NO: 4094 - DNA, 27 bp, Homo Sapiens
tggtcctttgcagggtgagtgagcgag

SEQ ID NO: 4095 - DNA, 27 bp, Homo Sapiens
ggtcctttgcagggtgagtgagcgaga

SEQ ID NO: 4096 - DNA, 27 bp, Homo Sapiens
gtcctttgcagggtgagtgagcgagag

SEQ ID NO: 4097 - DNA, 27 bp, Homo Sapiens
tcctttgcagggtgagtgagcgagagg

SEQ ID NO: 4098 - DNA, 27 bp, Homo Sapiens
cctttgcagggtgagtgagcgagaggc

SEQ ID NO: 4099 - DNA, 27 bp, Homo Sapiens
ctttgcagggtgagtgagcgagaggct

SEQ ID NO: 4100 - DNA, 27 bp, Homo Sapiens
tttgcagggtgagtgagcgagaggctg

SEQ ID NO: 4101 - DNA, 27 bp, Homo Sapiens
ttgcagggtgagtgagcgagaggctgc

SEQ ID NO: 4102 - DNA, 27 bp, Homo Sapiens
tgcagggtgagtgagcgagaggctgct

SEQ ID NO: 4103 - DNA, 27 bp, Homo Sapiens
gcagggtgagtgagcgagaggctgctt

SEQ ID NO: 4104 - DNA, 27 bp, Homo Sapiens
cagggtgagtgagcgagaggctgcttt

SEQ ID NO: 4105 - DNA, 27 bp, Homo Sapiens
agggtgagtgagcgagaggctgctttg

SEQ ID NO: 4106 - DNA, 27 bp, Homo Sapiens
gggtgagtgagcgagaggctgctttgg

SEQ ID NO: 4107 - DNA, 27 bp, Homo Sapiens
ggtgagtgagcgagaggctgctttgga

SEQ ID NO: 4108 - DNA, 27 bp, Homo Sapiens
gtgagtgagcgagaggctgctttggaa

SEQ ID NO: 4109 - DNA, 27 bp, Homo Sapiens
tgagtgagcgagaggctgctttggaag

SEQ ID NO: 4110 - DNA, 27 bp, Homo Sapiens
gagtgagcgagaggctgctttggaaga

SEQ ID NO: 4111 - DNA, 27 bp, Homo Sapiens
agtgagcgagaggctgctttggaagaa

SEQ ID NO: 4112 - DNA, 27 bp, Homo Sapiens
gtgagcgagaggctgctttggaagaaa

SEQ ID NO: 4113 - DNA, 27 bp, Homo Sapiens
tgagcgagaggctgctttggaagaaac

SEQ ID NO: 4114 - DNA, 27 bp, Homo Sapiens
gagcgagaggctgctttggaagaaact

SEQ ID NO: 4115 - DNA, 27 bp, Homo Sapiens
agcgagaggctgctttggaagaaactc

SEQ ID NO: 4116 - DNA, 27 bp, Homo Sapiens
gcgagaggctgctttggaagaaactca

SEQ ID NO: 4117 - DNA, 27 bp, Homo Sapiens
cgagaggctgctttggaagaaactcat

SEQ ID NO: 4118 - DNA, 27 bp, Homo Sapiens
gagaggctgctttggaagaaactcata

SEQ ID NO: 4119 - DNA, 27 bp, Homo Sapiens
agaggctgctttggaagaaactcatag

SEQ ID NO: 4120 - DNA, 27 bp, Homo Sapiens
gaggctgctttggaagaaactcataga

SEQ ID NO: 4121 - DNA, 27 bp, Homo Sapiens
aggctgctttggaagaaactcatagat

SEQ ID NO: 4122 - DNA, 27 bp, Homo Sapiens
ggctgctttggaagaaactcatagatt

SEQ ID NO: 4123 - DNA, 27 bp, Homo Sapiens
gctgctttggaagaaactcatagatta

SEQ ID NO: 4124 - DNA, 27 bp, Homo Sapiens
ctgctttggaagaaactcatagattac

SEQ ID NO: 4125 - DNA, 27 bp, Homo Sapiens
tgctttggaagaaactcatagattact

SEQ ID NO: 4126 - DNA, 27 bp, Homo Sapiens
gctttggaagaaactcatagattactg

SEQ ID NO: 4127 - DNA, 27 bp, Homo Sapiens
ctttggaagaaactcatagattactgc

SEQ ID NO: 4128 - DNA, 27 bp, Homo Sapiens
tttggaagaaactcatagattactgca

SEQ ID NO: 4129 - DNA, 27 bp, Homo Sapiens
ttggaagaaactcatagattactgcaa

SEQ ID NO: 4130 - DNA, 27 bp, Homo Sapiens
tggaagaaactcatagattactgcaac

SEQ ID NO: 4131 - DNA, 28 bp, Homo Sapiens
taattgcatctgaacatttggtcctttg

SEQ ID NO: 4132 - DNA, 28 bp, Homo Sapiens
aattgcatctgaacatttggtcctttgc

SEQ ID NO: 4133 - DNA, 28 bp, Homo Sapiens
attgcatctgaacatttggtcctttgca

SEQ ID NO: 4134 - DNA, 28 bp, Homo Sapiens
ttgcatctgaacatttggtcctttgcag

SEQ ID NO: 4135 - DNA, 28 bp, Homo Sapiens
tgcatctgaacatttggtcctttgcagg

SEQ ID NO: 4136 - DNA, 28 bp, Homo Sapiens
gcatctgaacatttggtcctttgcaggg

SEQ ID NO: 4137 - DNA, 28 bp, Homo Sapiens
catctgaacatttggtcctttgcagggt

SEQ ID NO: 4138 - DNA, 28 bp, Homo Sapiens
atctgaacatttggtcctttgcagggtg

SEQ ID NO: 4139 - DNA, 28 bp, Homo Sapiens
tctgaacatttggtcctttgcagggtga

SEQ ID NO: 4140 - DNA, 28 bp, Homo Sapiens
ctgaacatttggtcctttgcagggtgag

SEQ ID NO: 4141 - DNA, 28 bp, Homo Sapiens
tgaacatttggtcctttgcagggtgagt

SEQ ID NO: 4142 - DNA, 28 bp, Homo Sapiens
gaacatttggtcctttgcagggtgagtg

SEQ ID NO: 4143 - DNA, 28 bp, Homo Sapiens
aacatttggtcctttgcagggtgagtga

SEQ ID NO: 4144 - DNA, 28 bp, Homo Sapiens
acatttggtcctttgcagggtgagtgag

SEQ ID NO: 4145 - DNA, 28 bp, Homo Sapiens
catttggtcctttgcagggtgagtgagc

SEQ ID NO: 4146 - DNA, 28 bp, Homo Sapiens
atttggtcctttgcagggtgagtgagcg

SEQ ID NO: 4147 - DNA, 28 bp, Homo Sapiens
tttggtcctttgcagggtgagtgagcga

SEQ ID NO: 4148 - DNA, 28 bp, Homo Sapiens
ttggtcctttgcagggtgagtgagcgag

SEQ ID NO: 4149 - DNA, 28 bp, Homo Sapiens
tggtcctttgcagggtgagtgagcgaga

SEQ ID NO: 4150 - DNA, 28 bp, Homo Sapiens
ggtcctttgcagggtgagtgagcgagag

SEQ ID NO: 4151 - DNA, 28 bp, Homo Sapiens
gtcctttgcagggtgagtgagcgagagg

SEQ ID NO: 4152 - DNA, 28 bp, Homo Sapiens
tcctttgcagggtgagtgagcgagaggc

SEQ ID NO: 4153 - DNA, 28 bp, Homo Sapiens
cctttgcagggtgagtgagcgagaggct

SEQ ID NO: 4154 - DNA, 28 bp, Homo Sapiens
ctttgcagggtgagtgagcgagaggctg

SEQ ID NO: 4155 - DNA, 28 bp, Homo Sapiens
tttgcagggtgagtgagcgagaggctgc

SEQ ID NO: 4156 - DNA, 28 bp, Homo Sapiens
ttgcagggtgagtgagcgagaggctgct

SEQ ID NO: 4157 - DNA, 28 bp, Homo Sapiens
tgcagggtgagtgagcgagaggctgctt

SEQ ID NO: 4158 - DNA, 28 bp, Homo Sapiens
gcagggtgagtgagcgagaggctgcttt

SEQ ID NO: 4159 - DNA, 28 bp, Homo Sapiens
cagggtgagtgagcgagaggctgctttg

SEQ ID NO: 4160 - DNA, 28 bp, Homo Sapiens
agggtgagtgagcgagaggctgctttgg

SEQ ID NO: 4161 - DNA, 28 bp, Homo Sapiens
gggtgagtgagcgagaggctgctttgga

SEQ ID NO: 4162 - DNA, 28 bp, Homo Sapiens
ggtgagtgagcgagaggctgctttggaa

SEQ ID NO: 4163 - DNA, 28 bp, Homo Sapiens
gtgagtgagcgagaggctgctttggaag

SEQ ID NO: 4164 - DNA, 28 bp, Homo Sapiens
tgagtgagcgagaggctgctttggaaga

SEQ ID NO: 4165 - DNA, 28 bp, Homo Sapiens
gagtgagcgagaggctgctttggaagaa

SEQ ID NO: 4166 - DNA, 28 bp, Homo Sapiens
agtgagcgagaggctgctttggaagaaa

SEQ ID NO: 4167 - DNA, 28 bp, Homo Sapiens
gtgagcgagaggctgctttggaagaaac

SEQ ID NO: 4168 - DNA, 28 bp, Homo Sapiens
tgagcgagaggctgctttggaagaaact

SEQ ID NO: 4169 - DNA, 28 bp, Homo Sapiens
gagcgagaggctgctttggaagaaactc

SEQ ID NO: 4170 - DNA, 28 bp, Homo Sapiens
agcgagaggctgctttggaagaaactca

SEQ ID NO: 4171 - DNA, 28 bp, Homo Sapiens
gcgagaggctgctttggaagaaactcat

SEQ ID NO: 4172 - DNA, 28 bp, Homo Sapiens
cgagaggctgctttggaagaaactcata

SEQ ID NO: 4173 - DNA, 28 bp, Homo Sapiens
gagaggctgctttggaagaaactcatag

SEQ ID NO: 4174 - DNA, 28 bp, Homo Sapiens
agaggctgctttggaagaaactcataga

SEQ ID NO: 4175 - DNA, 28 bp, Homo Sapiens
gaggctgctttggaagaaactcatagat

SEQ ID NO: 4176 - DNA, 28 bp, Homo Sapiens
aggctgctttggaagaaactcatagatt

SEQ ID NO: 4177 - DNA, 28 bp, Homo Sapiens
ggctgctttggaagaaactcatagatta

SEQ ID NO: 4178 - DNA, 28 bp, Homo Sapiens
gctgctttggaagaaactcatagattac

SEQ ID NO: 4179 - DNA, 28 bp, Homo Sapiens
ctgctttggaagaaactcatagattact

SEQ ID NO: 4180 - DNA, 28 bp, Homo Sapiens
tgctttggaagaaactcatagattactg

SEQ ID NO: 4181 - DNA, 28 bp, Homo Sapiens
gctttggaagaaactcatagattactgc

SEQ ID NO: 4182 - DNA, 28 bp, Homo Sapiens
ctttggaagaaactcatagattactgca

SEQ ID NO: 4183 - DNA, 28 bp, Homo Sapiens
tttggaagaaactcatagattactgcaa

SEQ ID NO: 4184 - DNA, 28 bp, Homo Sapiens
ttggaagaaactcatagattactgcaac

SEQ ID NO: 4185 - DNA, 28 bp, Homo Sapiens
tggaagaaactcatagattactgcaaca

SEQ ID NO: 4186 - DNA, 29 bp, Homo Sapiens
ataattgcatctgaacatttggtcctttg

SEQ ID NO: 4187 - DNA, 29 bp, Homo Sapiens
taattgcatctgaacatttggtcctttgc

SEQ ID NO: 4188 - DNA, 29 bp, Homo Sapiens
aattgcatctgaacatttggtcctttgca

SEQ ID NO: 4189 - DNA, 29 bp, Homo Sapiens
attgcatctgaacatttggtcctttgcag

SEQ ID NO: 4190 - DNA, 29 bp, Homo Sapiens
ttgcatctgaacatttggtcctttgcagg

SEQ ID NO: 4191 - DNA, 29 bp, Homo Sapiens
tgcatctgaacatttggtcctttgcaggg

SEQ ID NO: 4192 - DNA, 29 bp, Homo Sapiens
gcatctgaacatttggtcctttgcagggt

SEQ ID NO: 4193 - DNA, 29 bp, Homo Sapiens
catctgaacatttggtcctttgcagggtg

SEQ ID NO: 4194 - DNA, 29 bp, Homo Sapiens
atctgaacatttggtcctttgcagggtga

SEQ ID NO: 4195 - DNA, 29 bp, Homo Sapiens
tctgaacatttggtcctttgcagggtgag

SEQ ID NO: 4196 - DNA, 29 bp, Homo Sapiens
ctgaacatttggtcctttgcagggtgagt

SEQ ID NO: 4197 - DNA, 29 bp, Homo Sapiens
tgaacatttggtcctttgcagggtgagtg

SEQ ID NO: 4198 - DNA, 29 bp, Homo Sapiens
gaacatttggtcctttgcagggtgagtga

SEQ ID NO: 4199 - DNA, 29 bp, Homo Sapiens
aacatttggtcctttgcagggtgagtgag

SEQ ID NO: 4200 - DNA, 29 bp, Homo Sapiens
acatttggtcctttgcagggtgagtgagc

SEQ ID NO: 4201 - DNA, 29 bp, Homo Sapiens
catttggtcctttgcagggtgagtgagcg

SEQ ID NO: 4202 - DNA, 29 bp, Homo Sapiens
atttggtcctttgcagggtgagtgagcga

SEQ ID NO: 4203 - DNA, 29 bp, Homo Sapiens
tttggtcctttgcagggtgagtgagcgag

SEQ ID NO: 4204 - DNA, 29 bp, Homo Sapiens
ttggtcctttgcagggtgagtgagcgaga

SEQ ID NO: 4205 - DNA, 29 bp, Homo Sapiens
tggtcctttgcagggtgagtgagcgagag

SEQ ID NO: 4206 - DNA, 29 bp, Homo Sapiens
ggtcctttgcagggtgagtgagcgagagg

SEQ ID NO: 4207 - DNA, 29 bp, Homo Sapiens
gtcctttgcagggtgagtgagcgagaggc

SEQ ID NO: 4208 - DNA, 29 bp, Homo Sapiens
tcctttgcagggtgagtgagcgagaggct

SEQ ID NO: 4209 - DNA, 29 bp, Homo Sapiens
cctttgcagggtgagtgagcgagaggctg

SEQ ID NO: 4210 - DNA, 29 bp, Homo Sapiens
ctttgcagggtgagtgagcgagaggctgc

SEQ ID NO: 4211 - DNA, 29 bp, Homo Sapiens
tttgcagggtgagtgagcgagaggctgct

SEQ ID NO: 4212 - DNA, 29 bp, Homo Sapiens
ttgcagggtgagtgagcgagaggctgctt

SEQ ID NO: 4213 - DNA, 29 bp, Homo Sapiens
tgcagggtgagtgagcgagaggctgcttt

SEQ ID NO: 4214 - DNA, 29 bp, Homo Sapiens
gcagggtgagtgagcgagaggctgctttg

SEQ ID NO: 4215 - DNA, 29 bp, Homo Sapiens
cagggtgagtgagcgagaggctgctttgg

SEQ ID NO: 4216 - DNA, 29 bp, Homo Sapiens
agggtgagtgagcgagaggctgctttgga

SEQ ID NO: 4217 - DNA, 29 bp, Homo Sapiens
gggtgagtgagcgagaggctgctttggaa

SEQ ID NO: 4218 - DNA, 29 bp, Homo Sapiens
ggtgagtgagcgagaggctgctttggaag

SEQ ID NO: 4219 - DNA, 29 bp, Homo Sapiens
gtgagtgagcgagaggctgctttggaaga

SEQ ID NO: 4220 - DNA, 29 bp, Homo Sapiens
tgagtgagcgagaggctgctttggaagaa

SEQ ID NO: 4221 - DNA, 29 bp, Homo Sapiens
gagtgagcgagaggctgctttggaagaaa

SEQ ID NO: 4222 - DNA, 29 bp, Homo Sapiens
agtgagcgagaggctgctttggaagaaac

SEQ ID NO: 4223 - DNA, 29 bp, Homo Sapiens
gtgagcgagaggctgctttggaagaaact

SEQ ID NO: 4224 - DNA, 29 bp, Homo Sapiens
tgagcgagaggctgctttggaagaaactc

SEQ ID NO: 4225 - DNA, 29 bp, Homo Sapiens
gagcgagaggctgctttggaagaaactca

SEQ ID NO: 4226 - DNA, 29 bp, Homo Sapiens
agcgagaggctgctttggaagaaactcat

SEQ ID NO: 4227 - DNA, 29 bp, Homo Sapiens
gcgagaggctgctttggaagaaactcata

SEQ ID NO: 4228 - DNA, 29 bp, Homo Sapiens
cgagaggctgctttggaagaaactcatag

SEQ ID NO: 4229 - DNA, 29 bp, Homo Sapiens
gagaggctgctttggaagaaactcataga

SEQ ID NO: 4230 - DNA, 29 bp, Homo Sapiens
agaggctgctttggaagaaactcatagat

SEQ ID NO: 4231 - DNA, 29 bp, Homo Sapiens
gaggctgctttggaagaaactcatagatt

SEQ ID NO: 4232 - DNA, 29 bp, Homo Sapiens
aggctgctttggaagaaactcatagatta

SEQ ID NO: 4233 - DNA, 29 bp, Homo Sapiens
ggctgctttggaagaaactcatagattac

SEQ ID NO: 4234 - DNA, 29 bp, Homo Sapiens
gctgctttggaagaaactcatagattact

SEQ ID NO: 4235 - DNA, 29 bp, Homo Sapiens
ctgctttggaagaaactcatagattactg

SEQ ID NO: 4236 - DNA, 29 bp, Homo Sapiens
tgctttggaagaaactcatagattactgc

SEQ ID NO: 4237 - DNA, 29 bp, Homo Sapiens
gctttggaagaaactcatagattactgca

SEQ ID NO: 4238 - DNA, 29 bp, Homo Sapiens
ctttggaagaaactcatagattactgcaa

SEQ ID NO: 4239 - DNA, 29 bp, Homo Sapiens
tttggaagaaactcatagattactgcaac

SEQ ID NO: 4240 - DNA, 29 bp, Homo Sapiens
ttggaagaaactcatagattactgcaaca

SEQ ID NO: 4241 - DNA, 29 bp, Homo Sapiens
tggaagaaactcatagattactgcaacag

SEQ ID NO: 4242 - DNA, 30 bp, Homo Sapiens
aataattgcatctgaacatttggtcctttg

SEQ ID NO: 4243 - DNA, 30 bp, Homo Sapiens
ataattgcatctgaacatttggtcctttgc

SEQ ID NO: 4244 - DNA, 30 bp, Homo Sapiens
taattgcatctgaacatttggtcctttgca

SEQ ID NO: 4245 - DNA, 30 bp, Homo Sapiens
aattgcatctgaacatttggtcctttgcag

SEQ ID NO: 4246 - DNA, 30 bp, Homo Sapiens
attgcatctgaacatttggtcctttgcagg

SEQ ID NO: 4247 - DNA, 30 bp, Homo Sapiens
ttgcatctgaacatttggtcctttgcaggg

SEQ ID NO: 4248 - DNA, 30 bp, Homo Sapiens
tgcatctgaacatttggtcctttgcagggt

SEQ ID NO: 4249 - DNA, 30 bp, Homo Sapiens
gcatctgaacatttggtcctttgcagggtg

SEQ ID NO: 4250 - DNA, 30 bp, Homo Sapiens
catctgaacatttggtcctttgcagggtga

SEQ ID NO: 4251 - DNA, 30 bp, Homo Sapiens
atctgaacatttggtcctttgcagggtgag

SEQ ID NO: 4252 - DNA, 30 bp, Homo Sapiens
tctgaacatttggtcctttgcagggtgagt

SEQ ID NO: 4253 - DNA, 30 bp, Homo Sapiens
ctgaacatttggtcctttgcagggtgagtg

SEQ ID NO: 4254 - DNA, 30 bp, Homo Sapiens
tgaacatttggtcctttgcagggtgagtga

SEQ ID NO: 4255 - DNA, 30 bp, Homo Sapiens
gaacatttggtcctttgcagggtgagtgag

SEQ ID NO: 4256 - DNA, 30 bp, Homo Sapiens
aacatttggtcctttgcagggtgagtgagc

SEQ ID NO: 4257 - DNA, 30 bp, Homo Sapiens
acatttggtcctttgcagggtgagtgagcg

SEQ ID NO: 4258 - DNA, 30 bp, Homo Sapiens
catttggtcctttgcagggtgagtgagcga

SEQ ID NO: 4259 - DNA, 30 bp, Homo Sapiens
atttggtcctttgcagggtgagtgagcgag

SEQ ID NO: 4260 - DNA, 30 bp, Homo Sapiens
tttggtcctttgcagggtgagtgagcgaga

SEQ ID NO: 4261 - DNA, 30 bp, Homo Sapiens
ttggtcctttgcagggtgagtgagcgagag

SEQ ID NO: 4262 - DNA, 30 bp, Homo Sapiens
tggtcctttgcagggtgagtgagcgagagg

SEQ ID NO: 4263 - DNA, 30 bp, Homo Sapiens
ggtcctttgcagggtgagtgagcgagaggc

SEQ ID NO: 4264 - DNA, 30 bp, Homo Sapiens
gtcctttgcagggtgagtgagcgagaggct

SEQ ID NO: 4265 - DNA, 30 bp, Homo Sapiens
tcctttgcagggtgagtgagcgagaggctg

SEQ ID NO: 4266 - DNA, 30 bp, Homo Sapiens
cctttgcagggtgagtgagcgagaggctgc

SEQ ID NO: 4267 - DNA, 30 bp, Homo Sapiens
ctttgcagggtgagtgagcgagaggctgct

SEQ ID NO: 4268 - DNA, 30 bp, Homo Sapiens
tttgcagggtgagtgagcgagaggctgctt

SEQ ID NO: 4269 - DNA, 30 bp, Homo Sapiens
ttgcagggtgagtgagcgagaggctgcttt

SEQ ID NO: 4270 - DNA, 30 bp, Homo Sapiens
tgcagggtgagtgagcgagaggctgctttg

SEQ ID NO: 4271 - DNA, 30 bp, Homo Sapiens
gcagggtgagtgagcgagaggctgctttgg

SEQ ID NO: 4272 - DNA, 30 bp, Homo Sapiens
cagggtgagtgagcgagaggctgctttgga

SEQ ID NO: 4273 - DNA, 30 bp, Homo Sapiens
agggtgagtgagcgagaggctgctttggaa

SEQ ID NO: 4274 - DNA, 30 bp, Homo Sapiens
gggtgagtgagcgagaggctgctttggaag

SEQ ID NO: 4275 - DNA, 30 bp, Homo Sapiens
ggtgagtgagcgagaggctgctttggaaga

SEQ ID NO: 4276 - DNA, 30 bp, Homo Sapiens
gtgagtgagcgagaggctgctttggaagaa

SEQ ID NO: 4277 - DNA, 30 bp, Homo Sapiens
tgagtgagcgagaggctgctttggaagaaa

SEQ ID NO: 4278 - DNA, 30 bp, Homo Sapiens
gagtgagcgagaggctgctttggaagaaac

SEQ ID NO: 4279 - DNA, 30 bp, Homo Sapiens
agtgagcgagaggctgctttggaagaaact

SEQ ID NO: 4280 - DNA, 30 bp, Homo Sapiens
gtgagcgagaggctgctttggaagaaactc

SEQ ID NO: 4281 - DNA, 30 bp, Homo Sapiens
tgagcgagaggctgctttggaagaaactca

SEQ ID NO: 4282 - DNA, 30 bp, Homo Sapiens
gagcgagaggctgctttggaagaaactcat

SEQ ID NO: 4283 - DNA, 30 bp, Homo Sapiens
agcgagaggctgctttggaagaaactcata

SEQ ID NO: 4284 - DNA, 30 bp, Homo Sapiens
gcgagaggctgctttggaagaaactcatag

SEQ ID NO: 4285 - DNA, 30 bp, Homo Sapiens
cgagaggctgctttggaagaaactcataga

SEQ ID NO: 4286 - DNA, 30 bp, Homo Sapiens
gagaggctgctttggaagaaactcatagat

SEQ ID NO: 4287 - DNA, 30 bp, Homo Sapiens
agaggctgctttggaagaaactcatagatt

SEQ ID NO: 4288 - DNA, 30 bp, Homo Sapiens
gaggctgctttggaagaaactcatagatta

SEQ ID NO: 4289 - DNA, 30 bp, Homo Sapiens
aggctgctttggaagaaactcatagattac

SEQ ID NO: 4290 - DNA, 30 bp, Homo Sapiens
ggctgctttggaagaaactcatagattact

SEQ ID NO: 4291 - DNA, 30 bp, Homo Sapiens
gctgctttggaagaaactcatagattactg

SEQ ID NO: 4292 - DNA, 30 bp, Homo Sapiens
ctgctttggaagaaactcatagattactgc

SEQ ID NO: 4293 - DNA, 30 bp, Homo Sapiens
tgctttggaagaaactcatagattactgca

SEQ ID NO: 4294 - DNA, 30 bp, Homo Sapiens
gctttggaagaaactcatagattactgcaa

SEQ ID NO: 4295 - DNA, 30 bp, Homo Sapiens
ctttggaagaaactcatagattactgcaac

SEQ ID NO: 4296 - DNA, 30 bp, Homo Sapiens
tttggaagaaactcatagattactgcaaca

SEQ ID NO: 4297 - DNA, 30 bp, Homo Sapiens
ttggaagaaactcatagattactgcaacag

SEQ ID NO: 4298 - DNA, 30 bp, Homo Sapiens
tggaagaaactcatagattactgcaacagt

SEQ ID NO: 4299 - DNA, 15 bp, Homo Sapiens
caaaggaccaaatgt

SEQ ID NO: 4300 - DNA, 15 bp, Homo Sapiens
gcaaaggaccaaatg

SEQ ID NO: 4301 - DNA, 15 bp, Homo Sapiens
tgcaaaggaccaaat

SEQ ID NO: 4302 - DNA, 15 bp, Homo Sapiens
ctgcaaaggaccaaa

SEQ ID NO: 4303 - DNA, 15 bp, Homo Sapiens
cctgcaaaggaccaa

SEQ ID NO: 4304 - DNA, 15 bp, Homo Sapiens
ccctgcaaaggacca

SEQ ID NO: 4305 - DNA, 15 bp, Homo Sapiens
accctgcaaaggacc

SEQ ID NO: 4306 - DNA, 15 bp, Homo Sapiens
caccctgcaaaggac

SEQ ID NO: 4307 - DNA, 15 bp, Homo Sapiens
tcaccctgcaaagga

SEQ ID NO: 4308 - DNA, 15 bp, Homo Sapiens
ctcaccctgcaaagg

SEQ ID NO: 4309 - DNA, 15 bp, Homo Sapiens
actcaccctgcaaag

SEQ ID NO: 4310 - DNA, 15 bp, Homo Sapiens
cactcaccctgcaaa

SEQ ID NO: 4311 - DNA, 15 bp, Homo Sapiens
tcactcaccctgcaa

SEQ ID NO: 4312 - DNA, 15 bp, Homo Sapiens
ctcactcaccctgca

SEQ ID NO: 4313 - DNA, 15 bp, Homo Sapiens
gctcactcaccctgc

SEQ ID NO: 4314 - DNA, 15 bp, Homo Sapiens
cgctcactcaccctg

SEQ ID NO: 4315 - DNA, 15 bp, Homo Sapiens
tcgctcactcaccct

SEQ ID NO: 4316 - DNA, 15 bp, Homo Sapiens
ctcgctcactcaccc

SEQ ID NO: 4317 - DNA, 15 bp, Homo Sapiens
tctcgctcactcacc

SEQ ID NO: 4318 - DNA, 15 bp, Homo Sapiens
ctctcgctcactcac

SEQ ID NO: 4319 - DNA, 15 bp, Homo Sapiens
cctctcgctcactca

SEQ ID NO: 4320 - DNA, 15 bp, Homo Sapiens
gcctctcgctcactc

SEQ ID NO: 4321 - DNA, 15 bp, Homo Sapiens
agcctctcgctcact

SEQ ID NO: 4322 - DNA, 15 bp, Homo Sapiens
cagcctctcgctcac

SEQ ID NO: 4323 - DNA, 15 bp, Homo Sapiens
gcagcctctcgctca

SEQ ID NO: 4324 - DNA, 15 bp, Homo Sapiens
agcagcctctcgctc

SEQ ID NO: 4325 - DNA, 15 bp, Homo Sapiens
aagcagcctctcgct

SEQ ID NO: 4326 - DNA, 15 bp, Homo Sapiens
aaagcagcctctcgc

SEQ ID NO: 4327 - DNA, 15 bp, Homo Sapiens
caaagcagcctctcg

SEQ ID NO: 4328 - DNA, 15 bp, Homo Sapiens
ccaaagcagcctctc

SEQ ID NO: 4329 - DNA, 15 bp, Homo Sapiens
tccaaagcagcctct

SEQ ID NO: 4330 - DNA, 15 bp, Homo Sapiens
ttccaaagcagcctc

SEQ ID NO: 4331 - DNA, 15 bp, Homo Sapiens
cttccaaagcagcct

SEQ ID NO: 4332 - DNA, 15 bp, Homo Sapiens
tcttccaaagcagcc

SEQ ID NO: 4333 - DNA, 15 bp, Homo Sapiens
ttcttccaaagcagc

SEQ ID NO: 4334 - DNA, 15 bp, Homo Sapiens
tttcttccaaagcag

SEQ ID NO: 4335 - DNA, 15 bp, Homo Sapiens
gtttcttccaaagca

SEQ ID NO: 4336 - DNA, 15 bp, Homo Sapiens
agtttcttccaaagc

SEQ ID NO: 4337 - DNA, 15 bp, Homo Sapiens
gagtttcttccaaag

SEQ ID NO: 4338 - DNA, 15 bp, Homo Sapiens
tgagtttcttccaaa

SEQ ID NO: 4339 - DNA, 15 bp, Homo Sapiens
atgagtttcttccaa

SEQ ID NO: 4340 - DNA, 15 bp, Homo Sapiens
tatgagtttcttcca

SEQ ID NO: 4341 - DNA, 16 bp, Homo Sapiens
caaaggaccaaatgtt

SEQ ID NO: 4342 - DNA, 16 bp, Homo Sapiens
gcaaaggaccaaatgt

SEQ ID NO: 4343 - DNA, 16 bp, Homo Sapiens
tgcaaaggaccaaatg

SEQ ID NO: 4344 - DNA, 16 bp, Homo Sapiens
ctgcaaaggaccaaat

SEQ ID NO: 4345 - DNA, 16 bp, Homo Sapiens
cctgcaaaggaccaaa

SEQ ID NO: 4346 - DNA, 16 bp, Homo Sapiens
ccctgcaaaggaccaa

SEQ ID NO: 4347 - DNA, 16 bp, Homo Sapiens
accctgcaaaggacca

SEQ ID NO: 4348 - DNA, 16 bp, Homo Sapiens
caccctgcaaaggacc

SEQ ID NO: 4349 - DNA, 16 bp, Homo Sapiens
tcaccctgcaaaggac

SEQ ID NO: 4350 - DNA, 16 bp, Homo Sapiens
ctcaccctgcaaagga

SEQ ID NO: 4351 - DNA, 16 bp, Homo Sapiens
actcaccctgcaaagg

SEQ ID NO: 4352 - DNA, 16 bp, Homo Sapiens
cactcaccctgcaaag

SEQ ID NO: 4353 - DNA, 16 bp, Homo Sapiens
tcactcaccctgcaaa

SEQ ID NO: 4354 - DNA, 16 bp, Homo Sapiens
ctcactcaccctgcaa

SEQ ID NO: 4355 - DNA, 16 bp, Homo Sapiens
gctcactcaccctgca

SEQ ID NO: 4356 - DNA, 16 bp, Homo Sapiens
cgctcactcaccctgc

SEQ ID NO: 4357 - DNA, 16 bp, Homo Sapiens
tcgctcactcaccctg

SEQ ID NO: 4358 - DNA, 16 bp, Homo Sapiens
ctcgctcactcaccct

SEQ ID NO: 4359 - DNA, 16 bp, Homo Sapiens
tctcgctcactcaccc

SEQ ID NO: 4360 - DNA, 16 bp, Homo Sapiens
ctctcgctcactcacc

SEQ ID NO: 4361 - DNA, 16 bp, Homo Sapiens
cctctcgctcactcac

SEQ ID NO: 4362 - DNA, 16 bp, Homo Sapiens
gcctctcgctcactca

SEQ ID NO: 4363 - DNA, 16 bp, Homo Sapiens
agcctctcgctcactc

SEQ ID NO: 4364 - DNA, 16 bp, Homo Sapiens
cagcctctcgctcact

SEQ ID NO: 4365 - DNA, 16 bp, Homo Sapiens
gcagcctctcgctcac

SEQ ID NO: 4366 - DNA, 16 bp, Homo Sapiens
agcagcctctcgctca

SEQ ID NO: 4367 - DNA, 16 bp, Homo Sapiens
aagcagcctctcgctc

SEQ ID NO: 4368 - DNA, 16 bp, Homo Sapiens
aaagcagcctctcgct

SEQ ID NO: 4369 - DNA, 16 bp, Homo Sapiens
caaagcagcctctcgc

SEQ ID NO: 4370 - DNA, 16 bp, Homo Sapiens
ccaaagcagcctctcg

SEQ ID NO: 4371 - DNA, 16 bp, Homo Sapiens
tccaaagcagcctctc

SEQ ID NO: 4372 - DNA, 16 bp, Homo Sapiens
ttccaaagcagcctct

SEQ ID NO: 4373 - DNA, 16 bp, Homo Sapiens
cttccaaagcagcctc

SEQ ID NO: 4374 - DNA, 16 bp, Homo Sapiens
tcttccaaagcagcct

SEQ ID NO: 4375 - DNA, 16 bp, Homo Sapiens
ttcttccaaagcagcc

SEQ ID NO: 4376 - DNA, 16 bp, Homo Sapiens
tttcttccaaagcagc

SEQ ID NO: 4377 - DNA, 16 bp, Homo Sapiens
gtttcttccaaagcag

SEQ ID NO: 4378 - DNA, 16 bp, Homo Sapiens
agtttcttccaaagca

SEQ ID NO: 4379 - DNA, 16 bp, Homo Sapiens
gagtttcttccaaagc

SEQ ID NO: 4380 - DNA, 16 bp, Homo Sapiens
tgagtttcttccaaag

SEQ ID NO: 4381 - DNA, 16 bp, Homo Sapiens
atgagtttcttccaaa

SEQ ID NO: 4382 - DNA, 16 bp, Homo Sapiens
tatgagtttcttccaa

SEQ ID NO: 4383 - DNA, 16 bp, Homo Sapiens
ctatgagtttcttcca

SEQ ID NO: 4384 - DNA, 17 bp, Homo Sapiens
caaaggaccaaatgttc

SEQ ID NO: 4385 - DNA, 17 bp, Homo Sapiens
gcaaaggaccaaatgtt

SEQ ID NO: 4386 - DNA, 17 bp, Homo Sapiens
tgcaaaggaccaaatgt

SEQ ID NO: 4387 - DNA, 17 bp, Homo Sapiens
ctgcaaaggaccaaatg

SEQ ID NO: 4388 - DNA, 17 bp, Homo Sapiens
cctgcaaaggaccaaat

SEQ ID NO: 4389 - DNA, 17 bp, Homo Sapiens
ccctgcaaaggaccaaa

SEQ ID NO: 4390 - DNA, 17 bp, Homo Sapiens
accctgcaaaggaccaa

SEQ ID NO: 4391 - DNA, 17 bp, Homo Sapiens
caccctgcaaaggacca

SEQ ID NO: 4392 - DNA, 17 bp, Homo Sapiens
tcaccctgcaaaggacc

SEQ ID NO: 4393 - DNA, 17 bp, Homo Sapiens
ctcaccctgcaaaggac

SEQ ID NO: 4394 - DNA, 17 bp, Homo Sapiens
actcaccctgcaaagga

SEQ ID NO: 4395 - DNA, 17 bp, Homo Sapiens
cactcaccctgcaaagg

SEQ ID NO: 4396 - DNA, 17 bp, Homo Sapiens
tcactcaccctgcaaag

SEQ ID NO: 4397 - DNA, 17 bp, Homo Sapiens
ctcactcaccctgcaaa

SEQ ID NO: 4398 - DNA, 17 bp, Homo Sapiens
gctcactcaccctgcaa

SEQ ID NO: 4399 - DNA, 17 bp, Homo Sapiens
cgctcactcaccctgca

SEQ ID NO: 4400 - DNA, 17 bp, Homo Sapiens
tcgctcactcaccctgc

SEQ ID NO: 4401 - DNA, 17 bp, Homo Sapiens
ctcgctcactcaccctg

SEQ ID NO: 4402 - DNA, 17 bp, Homo Sapiens
tctcgctcactcaccct

SEQ ID NO: 4403 - DNA, 17 bp, Homo Sapiens
ctctcgctcactcaccc

SEQ ID NO: 4404 - DNA, 17 bp, Homo Sapiens
cctctcgctcactcacc

SEQ ID NO: 4405 - DNA, 17 bp, Homo Sapiens
gcctctcgctcactcac

SEQ ID NO: 4406 - DNA, 17 bp, Homo Sapiens
agcctctcgctcactca

SEQ ID NO: 4407 - DNA, 17 bp, Homo Sapiens
cagcctctcgctcactc

SEQ ID NO: 4408 - DNA, 17 bp, Homo Sapiens
gcagcctctcgctcact

SEQ ID NO: 4409 - DNA, 17 bp, Homo Sapiens
agcagcctctcgctcac

SEQ ID NO: 4410 - DNA, 17 bp, Homo Sapiens
aagcagcctctcgctca

SEQ ID NO: 4411 - DNA, 17 bp, Homo Sapiens
aaagcagcctctcgctc

SEQ ID NO: 4412 - DNA, 17 bp, Homo Sapiens
caaagcagcctctcgct

SEQ ID NO: 4413 - DNA, 17 bp, Homo Sapiens
ccaaagcagcctctcgc

SEQ ID NO: 4414 - DNA, 17 bp, Homo Sapiens
tccaaagcagcctctcg

SEQ ID NO: 4415 - DNA, 17 bp, Homo Sapiens
ttccaaagcagcctctc

SEQ ID NO: 4416 - DNA, 17 bp, Homo Sapiens
cttccaaagcagcctct

SEQ ID NO: 4417 - DNA, 17 bp, Homo Sapiens
tcttccaaagcagcctc

SEQ ID NO: 4418 - DNA, 17 bp, Homo Sapiens
ttcttccaaagcagcct

SEQ ID NO: 4419 - DNA, 17 bp, Homo Sapiens
tttcttccaaagcagcc

SEQ ID NO: 4420 - DNA, 17 bp, Homo Sapiens
gtttcttccaaagcagc

SEQ ID NO: 4421 - DNA, 17 bp, Homo Sapiens
agtttcttccaaagcag

SEQ ID NO: 4422 - DNA, 17 bp, Homo Sapiens
gagtttcttccaaagca

SEQ ID NO: 4423 - DNA, 17 bp, Homo Sapiens
tgagtttcttccaaagc

SEQ ID NO: 4424 - DNA, 17 bp, Homo Sapiens
atgagtttcttccaaag

SEQ ID NO: 4425 - DNA, 17 bp, Homo Sapiens
tatgagtttcttccaaa

SEQ ID NO: 4426 - DNA, 17 bp, Homo Sapiens
ctatgagtttcttccaa

SEQ ID NO: 4427 - DNA, 17 bp, Homo Sapiens
tctatgagtttcttcca

SEQ ID NO: 4428 - DNA, 18 bp, Homo Sapiens
caaaggaccaaatgttca

SEQ ID NO: 4429 - DNA, 18 bp, Homo Sapiens
gcaaaggaccaaatgttc

SEQ ID NO: 4430 - DNA, 18 bp, Homo Sapiens
tgcaaaggaccaaatgtt

SEQ ID NO: 4431 - DNA, 18 bp, Homo Sapiens
ctgcaaaggaccaaatgt

SEQ ID NO: 4432 - DNA, 18 bp, Homo Sapiens
cctgcaaaggaccaaatg

SEQ ID NO: 4433 - DNA, 18 bp, Homo Sapiens
ccctgcaaaggaccaaat

SEQ ID NO: 4434 - DNA, 18 bp, Homo Sapiens
accctgcaaaggaccaaa

SEQ ID NO: 4435 - DNA, 18 bp, Homo Sapiens
caccctgcaaaggaccaa

SEQ ID NO: 4436 - DNA, 18 bp, Homo Sapiens
tcaccctgcaaaggacca

SEQ ID NO: 4437 - DNA, 18 bp, Homo Sapiens
ctcaccctgcaaaggacc

SEQ ID NO: 4438 - DNA, 18 bp, Homo Sapiens
actcaccctgcaaaggac

SEQ ID NO: 4439 - DNA, 18 bp, Homo Sapiens
cactcaccctgcaaagga

SEQ ID NO: 4440 - DNA, 18 bp, Homo Sapiens
tcactcaccctgcaaagg

SEQ ID NO: 4441 - DNA, 18 bp, Homo Sapiens
ctcactcaccctgcaaag

SEQ ID NO: 4442 - DNA, 18 bp, Homo Sapiens
gctcactcaccctgcaaa

SEQ ID NO: 4443 - DNA, 18 bp, Homo Sapiens
cgctcactcaccctgcaa

SEQ ID NO: 4444 - DNA, 18 bp, Homo Sapiens
tcgctcactcaccctgca

SEQ ID NO: 4445 - DNA, 18 bp, Homo Sapiens
ctcgctcactcaccctgc

SEQ ID NO: 4446 - DNA, 18 bp, Homo Sapiens
tctcgctcactcaccctg

SEQ ID NO: 4447 - DNA, 18 bp, Homo Sapiens
ctctcgctcactcaccct

SEQ ID NO: 4448 - DNA, 18 bp, Homo Sapiens
cctctcgctcactcaccc

SEQ ID NO: 4449 - DNA, 18 bp, Homo Sapiens
gcctctcgctcactcacc

SEQ ID NO: 4450 - DNA, 18 bp, Homo Sapiens
agcctctcgctcactcac

SEQ ID NO: 4451 - DNA, 18 bp, Homo Sapiens
cagcctctcgctcactca

SEQ ID NO: 4452 - DNA, 18 bp, Homo Sapiens
gcagcctctcgctcactc

SEQ ID NO: 4453 - DNA, 18 bp, Homo Sapiens
agcagcctctcgctcact

SEQ ID NO: 4454 - DNA, 18 bp, Homo Sapiens
aagcagcctctcgctcac

SEQ ID NO: 4455 - DNA, 18 bp, Homo Sapiens
aaagcagcctctcgctca

SEQ ID NO: 4456 - DNA, 18 bp, Homo Sapiens
caaagcagcctctcgctc

SEQ ID NO: 4457 - DNA, 18 bp, Homo Sapiens
ccaaagcagcctctcgct

SEQ ID NO: 4458 - DNA, 18 bp, Homo Sapiens
tccaaagcagcctctcgc

SEQ ID NO: 4459 - DNA, 18 bp, Homo Sapiens
ttccaaagcagcctctcg

SEQ ID NO: 4460 - DNA, 18 bp, Homo Sapiens
cttccaaagcagcctctc

SEQ ID NO: 4461 - DNA, 18 bp, Homo Sapiens
tcttccaaagcagcctct

SEQ ID NO: 4462 - DNA, 18 bp, Homo Sapiens
ttcttccaaagcagcctc

SEQ ID NO: 4463 - DNA, 18 bp, Homo Sapiens
tttcttccaaagcagcct

SEQ ID NO: 4464 - DNA, 18 bp, Homo Sapiens
gtttcttccaaagcagcc

SEQ ID NO: 4465 - DNA, 18 bp, Homo Sapiens
agtttcttccaaagcagc

SEQ ID NO: 4466 - DNA, 18 bp, Homo Sapiens
gagtttcttccaaagcag

SEQ ID NO: 4467 - DNA, 18 bp, Homo Sapiens
tgagtttcttccaaagca

SEQ ID NO: 4468 - DNA, 18 bp, Homo Sapiens
atgagtttcttccaaagc

SEQ ID NO: 4469 - DNA, 18 bp, Homo Sapiens
tatgagtttcttccaaag

SEQ ID NO: 4470 - DNA, 18 bp, Homo Sapiens
ctatgagtttcttccaaa

SEQ ID NO: 4471 - DNA, 18 bp, Homo Sapiens
tctatgagtttcttccaa

SEQ ID NO: 4472 - DNA, 18 bp, Homo Sapiens
atctatgagtttcttcca

SEQ ID NO: 4473 - DNA, 19 bp, Homo Sapiens
caaaggaccaaatgttcag

SEQ ID NO: 4474 - DNA, 19 bp, Homo Sapiens
gcaaaggaccaaatgttca

SEQ ID NO: 4475 - DNA, 19 bp, Homo Sapiens
tgcaaaggaccaaatgttc

SEQ ID NO: 4476 - DNA, 19 bp, Homo Sapiens
ctgcaaaggaccaaatgtt

SEQ ID NO: 4477 - DNA, 19 bp, Homo Sapiens
cctgcaaaggaccaaatgt

SEQ ID NO: 4478 - DNA, 19 bp, Homo Sapiens
ccctgcaaaggaccaaatg

SEQ ID NO: 4479 - DNA, 19 bp, Homo Sapiens
accctgcaaaggaccaaat

SEQ ID NO: 4480 - DNA, 19 bp, Homo Sapiens
caccctgcaaaggaccaaa

SEQ ID NO: 4481 - DNA, 19 bp, Homo Sapiens
tcaccctgcaaaggaccaa

SEQ ID NO: 4482 - DNA, 19 bp, Homo Sapiens
ctcaccctgcaaaggacca

SEQ ID NO: 4483 - DNA, 19 bp, Homo Sapiens
actcaccctgcaaaggacc

SEQ ID NO: 4484 - DNA, 19 bp, Homo Sapiens
cactcaccctgcaaaggac

SEQ ID NO: 4485 - DNA, 19 bp, Homo Sapiens
tcactcaccctgcaaagga

SEQ ID NO: 4486 - DNA, 19 bp, Homo Sapiens
ctcactcaccctgcaaagg

SEQ ID NO: 4487 - DNA, 19 bp, Homo Sapiens
gctcactcaccctgcaaag

SEQ ID NO: 4488 - DNA, 19 bp, Homo Sapiens
cgctcactcaccctgcaaa

SEQ ID NO: 4489 - DNA, 19 bp, Homo Sapiens
tcgctcactcaccctgcaa

SEQ ID NO: 4490 - DNA, 19 bp, Homo Sapiens
ctcgctcactcaccctgca

SEQ ID NO: 4491 - DNA, 19 bp, Homo Sapiens
tctcgctcactcaccctgc

SEQ ID NO: 4492 - DNA, 19 bp, Homo Sapiens
ctctcgctcactcaccctg

SEQ ID NO: 4493 - DNA, 19 bp, Homo Sapiens
cctctcgctcactcaccct

SEQ ID NO: 4494 - DNA, 19 bp, Homo Sapiens
gcctctcgctcactcaccc

SEQ ID NO: 4495 - DNA, 19 bp, Homo Sapiens
agcctctcgctcactcacc

SEQ ID NO: 4496 - DNA, 19 bp, Homo Sapiens
cagcctctcgctcactcac

SEQ ID NO: 4497 - DNA, 19 bp, Homo Sapiens
gcagcctctcgctcactca

SEQ ID NO: 4498 - DNA, 19 bp, Homo Sapiens
agcagcctctcgctcactc

SEQ ID NO: 4499 - DNA, 19 bp, Homo Sapiens
aagcagcctctcgctcact

SEQ ID NO: 4500 - DNA, 19 bp, Homo Sapiens
aaagcagcctctcgctcac

SEQ ID NO: 4501 - DNA, 19 bp, Homo Sapiens
caaagcagcctctcgctca

SEQ ID NO: 4502 - DNA, 19 bp, Homo Sapiens
ccaaagcagcctctcgctc

SEQ ID NO: 4503 - DNA, 19 bp, Homo Sapiens
tccaaagcagcctctcgct

SEQ ID NO: 4504 - DNA, 19 bp, Homo Sapiens
ttccaaagcagcctctcgc

SEQ ID NO: 4505 - DNA, 19 bp, Homo Sapiens
cttccaaagcagcctctcg

SEQ ID NO: 4506 - DNA, 19 bp, Homo Sapiens
tcttccaaagcagcctctc

SEQ ID NO: 4507 - DNA, 19 bp, Homo Sapiens
ttcttccaaagcagcctct

SEQ ID NO: 4508 - DNA, 19 bp, Homo Sapiens
tttcttccaaagcagcctc

SEQ ID NO: 4509 - DNA, 19 bp, Homo Sapiens
gtttcttccaaagcagcct

SEQ ID NO: 4510 - DNA, 19 bp, Homo Sapiens
agtttcttccaaagcagcc

SEQ ID NO: 4511 - DNA, 19 bp, Homo Sapiens
gagtttcttccaaagcagc

SEQ ID NO: 4512 - DNA, 19 bp, Homo Sapiens
tgagtttcttccaaagcag

SEQ ID NO: 4513 - DNA, 19 bp, Homo Sapiens
atgagtttcttccaaagca

SEQ ID NO: 4514 - DNA, 19 bp, Homo Sapiens
tatgagtttcttccaaagc

SEQ ID NO: 4515 - DNA, 19 bp, Homo Sapiens
ctatgagtttcttccaaag

SEQ ID NO: 4516 - DNA, 19 bp, Homo Sapiens
tctatgagtttcttccaaa

SEQ ID NO: 4517 - DNA, 19 bp, Homo Sapiens
atctatgagtttcttccaa

SEQ ID NO: 4518 - DNA, 19 bp, Homo Sapiens
aatctatgagtttcttcca

SEQ ID NO: 4519 - DNA, 20 bp, Homo Sapiens
caaaggaccaaatgttcaga

SEQ ID NO: 4520 - DNA, 20 bp, Homo Sapiens
gcaaaggaccaaatgttcag

SEQ ID NO: 4521 - DNA, 20 bp, Homo Sapiens
tgcaaaggaccaaatgttca

SEQ ID NO: 4522 - DNA, 20 bp, Homo Sapiens
ctgcaaaggaccaaatgttc

SEQ ID NO: 4523 - DNA, 20 bp, Homo Sapiens
cctgcaaaggaccaaatgtt

SEQ ID NO: 4524 - DNA, 20 bp, Homo Sapiens
ccctgcaaaggaccaaatgt

SEQ ID NO: 4525 - DNA, 20 bp, Homo Sapiens
accctgcaaaggaccaaatg

SEQ ID NO: 4526 - DNA, 20 bp, Homo Sapiens
caccctgcaaaggaccaaat

SEQ ID NO: 4527 - DNA, 20 bp, Homo Sapiens
tcaccctgcaaaggaccaaa

SEQ ID NO: 4528 - DNA, 20 bp, Homo Sapiens
ctcaccctgcaaaggaccaa

SEQ ID NO: 4529 - DNA, 20 bp, Homo Sapiens
actcaccctgcaaaggacca

SEQ ID NO: 4530 - DNA, 20 bp, Homo Sapiens
cactcaccctgcaaaggacc

SEQ ID NO: 4531 - DNA, 20 bp, Homo Sapiens
tcactcaccctgcaaaggac

SEQ ID NO: 4532 - DNA, 20 bp, Homo Sapiens
ctcactcaccctgcaaagga

SEQ ID NO: 4533 - DNA, 20 bp, Homo Sapiens
gctcactcaccctgcaaagg

SEQ ID NO: 4534 - DNA, 20 bp, Homo Sapiens
cgctcactcaccctgcaaag

SEQ ID NO: 4535 - DNA, 20 bp, Homo Sapiens
tcgctcactcaccctgcaaa

SEQ ID NO: 4536 - DNA, 20 bp, Homo Sapiens
ctcgctcactcaccctgcaa

SEQ ID NO: 4537 - DNA, 20 bp, Homo Sapiens
tctcgctcactcaccctgca

SEQ ID NO: 4538 - DNA, 20 bp, Homo Sapiens
ctctcgctcactcaccctgc

SEQ ID NO: 4539 - DNA, 20 bp, Homo Sapiens
cctctcgctcactcaccctg

SEQ ID NO: 4540 - DNA, 20 bp, Homo Sapiens
gcctctcgctcactcaccct

SEQ ID NO: 4541 - DNA, 20 bp, Homo Sapiens
agcctctcgctcactcaccc

SEQ ID NO: 4542 - DNA, 20 bp, Homo Sapiens
cagcctctcgctcactcacc

SEQ ID NO: 4543 - DNA, 20 bp, Homo Sapiens
gcagcctctcgctcactcac

SEQ ID NO: 4544 - DNA, 20 bp, Homo Sapiens
agcagcctctcgctcactca

SEQ ID NO: 4545 - DNA, 20 bp, Homo Sapiens
aagcagcctctcgctcactc

SEQ ID NO: 4546 - DNA, 20 bp, Homo Sapiens
aaagcagcctctcgctcact

SEQ ID NO: 4547 - DNA, 20 bp, Homo Sapiens
caaagcagcctctcgctcac

SEQ ID NO: 4548 - DNA, 20 bp, Homo Sapiens
ccaaagcagcctctcgctca

SEQ ID NO: 4549 - DNA, 20 bp, Homo Sapiens
tccaaagcagcctctcgctc

SEQ ID NO: 4550 - DNA, 20 bp, Homo Sapiens
ttccaaagcagcctctcgct

SEQ ID NO: 4551 - DNA, 20 bp, Homo Sapiens
cttccaaagcagcctctcgc

SEQ ID NO: 4552 - DNA, 20 bp, Homo Sapiens
tcttccaaagcagcctctcg

SEQ ID NO: 4553 - DNA, 20 bp, Homo Sapiens
ttcttccaaagcagcctctc

SEQ ID NO: 4554 - DNA, 20 bp, Homo Sapiens
tttcttccaaagcagcctct

SEQ ID NO: 4555 - DNA, 20 bp, Homo Sapiens
gtttcttccaaagcagcctc

SEQ ID NO: 4556 - DNA, 20 bp, Homo Sapiens
agtttcttccaaagcagcct

SEQ ID NO: 4557 - DNA, 20 bp, Homo Sapiens
gagtttcttccaaagcagcc

SEQ ID NO: 4558 - DNA, 20 bp, Homo Sapiens
tgagtttcttccaaagcagc

SEQ ID NO: 4559 - DNA, 20 bp, Homo Sapiens
atgagtttcttccaaagcag

SEQ ID NO: 4560 - DNA, 20 bp, Homo Sapiens
tatgagtttcttccaaagca

SEQ ID NO: 4561 - DNA, 20 bp, Homo Sapiens
ctatgagtttcttccaaagc

SEQ ID NO: 4562 - DNA, 20 bp, Homo Sapiens
tctatgagtttcttccaaag

SEQ ID NO: 4563 - DNA, 20 bp, Homo Sapiens
atctatgagtttcttccaaa

SEQ ID NO: 4564 - DNA, 20 bp, Homo Sapiens
aatctatgagtttcttccaa

SEQ ID NO: 4565 - DNA, 20 bp, Homo Sapiens
taatctatgagtttcttcca

SEQ ID NO: 4566 - DNA, 21 bp, Homo Sapiens
caaaggaccaaatgttcagat

SEQ ID NO: 4567 - DNA, 21 bp, Homo Sapiens
gcaaaggaccaaatgttcaga

SEQ ID NO: 4568 - DNA, 21 bp, Homo Sapiens
tgcaaaggaccaaatgttcag

SEQ ID NO: 4569 - DNA, 21 bp, Homo Sapiens
ctgcaaaggaccaaatgttca

SEQ ID NO: 4570 - DNA, 21 bp, Homo Sapiens
cctgcaaaggaccaaatgttc

SEQ ID NO: 4571 - DNA, 21 bp, Homo Sapiens
ccctgcaaaggaccaaatgtt

SEQ ID NO: 4572 - DNA, 21 bp, Homo Sapiens
accctgcaaaggaccaaatgt

SEQ ID NO: 4573 - DNA, 21 bp, Homo Sapiens
caccctgcaaaggaccaaatg

SEQ ID NO: 4574 - DNA, 21 bp, Homo Sapiens
tcaccctgcaaaggaccaaat

SEQ ID NO: 4575 - DNA, 21 bp, Homo Sapiens
ctcaccctgcaaaggaccaaa

SEQ ID NO: 4576 - DNA, 21 bp, Homo Sapiens
actcaccctgcaaaggaccaa

SEQ ID NO: 4577 - DNA, 21 bp, Homo Sapiens
cactcaccctgcaaaggacca

SEQ ID NO: 4578 - DNA, 21 bp, Homo Sapiens
tcactcaccctgcaaaggacc

SEQ ID NO: 4579 - DNA, 21 bp, Homo Sapiens
ctcactcaccctgcaaaggac

SEQ ID NO: 4580 - DNA, 21 bp, Homo Sapiens
gctcactcaccctgcaaagga

SEQ ID NO: 4581 - DNA, 21 bp, Homo Sapiens
cgctcactcaccctgcaaagg

SEQ ID NO: 4582 - DNA, 21 bp, Homo Sapiens
tcgctcactcaccctgcaaag

SEQ ID NO: 4583 - DNA, 21 bp, Homo Sapiens
ctcgctcactcaccctgcaaa

SEQ ID NO: 4584 - DNA, 21 bp, Homo Sapiens
tctcgctcactcaccctgcaa

SEQ ID NO: 4585 - DNA, 21 bp, Homo Sapiens
ctctcgctcactcaccctgca

SEQ ID NO: 4586 - DNA, 21 bp, Homo Sapiens
cctctcgctcactcaccctgc

SEQ ID NO: 4587 - DNA, 21 bp, Homo Sapiens
gcctctcgctcactcaccctg

SEQ ID NO: 4588 - DNA, 21 bp, Homo Sapiens
agcctctcgctcactcaccct

SEQ ID NO: 4589 - DNA, 21 bp, Homo Sapiens
cagcctctcgctcactcaccc

SEQ ID NO: 4590 - DNA, 21 bp, Homo Sapiens
gcagcctctcgctcactcacc

SEQ ID NO: 4591 - DNA, 21 bp, Homo Sapiens
agcagcctctcgctcactcac

SEQ ID NO: 4592 - DNA, 21 bp, Homo Sapiens
aagcagcctctcgctcactca

SEQ ID NO: 4593 - DNA, 21 bp, Homo Sapiens
aaagcagcctctcgctcactc

SEQ ID NO: 4594 - DNA, 21 bp, Homo Sapiens
caaagcagcctctcgctcact

SEQ ID NO: 4595 - DNA, 21 bp, Homo Sapiens
ccaaagcagcctctcgctcac

SEQ ID NO: 4596 - DNA, 21 bp, Homo Sapiens
tccaaagcagcctctcgctca

SEQ ID NO: 4597 - DNA, 21 bp, Homo Sapiens
ttccaaagcagcctctcgctc

SEQ ID NO: 4598 - DNA, 21 bp, Homo Sapiens
cttccaaagcagcctctcgct

SEQ ID NO: 4599 - DNA, 21 bp, Homo Sapiens
tcttccaaagcagcctctcgc

SEQ ID NO: 4600 - DNA, 21 bp, Homo Sapiens
ttcttccaaagcagcctctcg

SEQ ID NO: 4601 - DNA, 21 bp, Homo Sapiens
tttcttccaaagcagcctctc

SEQ ID NO: 4602 - DNA, 21 bp, Homo Sapiens
gtttcttccaaagcagcctct

SEQ ID NO: 4603 - DNA, 21 bp, Homo Sapiens
agtttcttccaaagcagcctc

SEQ ID NO: 4604 - DNA, 21 bp, Homo Sapiens
gagtttcttccaaagcagcct

SEQ ID NO: 4605 - DNA, 21 bp, Homo Sapiens
tgagtttcttccaaagcagcc

SEQ ID NO: 4606 - DNA, 21 bp, Homo Sapiens
atgagtttcttccaaagcagc

SEQ ID NO: 4607 - DNA, 21 bp, Homo Sapiens
tatgagtttcttccaaagcag

SEQ ID NO: 4608 - DNA, 21 bp, Homo Sapiens
ctatgagtttcttccaaagca

SEQ ID NO: 4609 - DNA, 21 bp, Homo Sapiens
tctatgagtttcttccaaagc

SEQ ID NO: 4610 - DNA, 21 bp, Homo Sapiens
atctatgagtttcttccaaag

SEQ ID NO: 4611 - DNA, 21 bp, Homo Sapiens
aatctatgagtttcttccaaa

SEQ ID NO: 4612 - DNA, 21 bp, Homo Sapiens
taatctatgagtttcttccaa

SEQ ID NO: 4613 - DNA, 21 bp, Homo Sapiens
gtaatctatgagtttcttcca

SEQ ID NO: 4614 - DNA, 22 bp, Homo Sapiens
caaaggaccaaatgttcagatg

SEQ ID NO: 4615 - DNA, 22 bp, Homo Sapiens
gcaaaggaccaaatgttcagat

SEQ ID NO: 4616 - DNA, 22 bp, Homo Sapiens
tgcaaaggaccaaatgttcaga

SEQ ID NO: 4617 - DNA, 22 bp, Homo Sapiens
ctgcaaaggaccaaatgttcag

SEQ ID NO: 4618 - DNA, 22 bp, Homo Sapiens
cctgcaaaggaccaaatgttca

SEQ ID NO: 4619 - DNA, 22 bp, Homo Sapiens
ccctgcaaaggaccaaatgttc

SEQ ID NO: 4620 - DNA, 22 bp, Homo Sapiens
accctgcaaaggaccaaatgtt

SEQ ID NO: 4621 - DNA, 22 bp, Homo Sapiens
caccctgcaaaggaccaaatgt

SEQ ID NO: 4622 - DNA, 22 bp, Homo Sapiens
tcaccctgcaaaggaccaaatg

SEQ ID NO: 4623 - DNA, 22 bp, Homo Sapiens
ctcaccctgcaaaggaccaaat

SEQ ID NO: 4624 - DNA, 22 bp, Homo Sapiens
actcaccctgcaaaggaccaaa

SEQ ID NO: 4625 - DNA, 22 bp, Homo Sapiens
cactcaccctgcaaaggaccaa

SEQ ID NO: 4626 - DNA, 22 bp, Homo Sapiens
tcactcaccctgcaaaggacca

SEQ ID NO: 4627 - DNA, 22 bp, Homo Sapiens
ctcactcaccctgcaaaggacc

SEQ ID NO: 4628 - DNA, 22 bp, Homo Sapiens
gctcactcaccctgcaaaggac

SEQ ID NO: 4629 - DNA, 22 bp, Homo Sapiens
cgctcactcaccctgcaaagga

SEQ ID NO: 4630 - DNA, 22 bp, Homo Sapiens
tcgctcactcaccctgcaaagg

SEQ ID NO: 4631 - DNA, 22 bp, Homo Sapiens
ctcgctcactcaccctgcaaag

SEQ ID NO: 4632 - DNA, 22 bp, Homo Sapiens
tctcgctcactcaccctgcaaa

SEQ ID NO: 4633 - DNA, 22 bp, Homo Sapiens
ctctcgctcactcaccctgcaa

SEQ ID NO: 4634 - DNA, 22 bp, Homo Sapiens
cctctcgctcactcaccctgca

SEQ ID NO: 4635 - DNA, 22 bp, Homo Sapiens
gcctctcgctcactcaccctgc

SEQ ID NO: 4636 - DNA, 22 bp, Homo Sapiens
agcctctcgctcactcaccctg

SEQ ID NO: 4637 - DNA, 22 bp, Homo Sapiens
cagcctctcgctcactcaccct

SEQ ID NO: 4638 - DNA, 22 bp, Homo Sapiens
gcagcctctcgctcactcaccc

SEQ ID NO: 4639 - DNA, 22 bp, Homo Sapiens
agcagcctctcgctcactcacc

SEQ ID NO: 4640 - DNA, 22 bp, Homo Sapiens
aagcagcctctcgctcactcac

SEQ ID NO: 4641 - DNA, 22 bp, Homo Sapiens
aaagcagcctctcgctcactca

SEQ ID NO: 4642 - DNA, 22 bp, Homo Sapiens
caaagcagcctctcgctcactc

SEQ ID NO: 4643 - DNA, 22 bp, Homo Sapiens
ccaaagcagcctctcgctcact

SEQ ID NO: 4644 - DNA, 22 bp, Homo Sapiens
tccaaagcagcctctcgctcac

SEQ ID NO: 4645 - DNA, 22 bp, Homo Sapiens
ttccaaagcagcctctcgctca

SEQ ID NO: 4646 - DNA, 22 bp, Homo Sapiens
cttccaaagcagcctctcgctc

SEQ ID NO: 4647 - DNA, 22 bp, Homo Sapiens
tcttccaaagcagcctctcgct

SEQ ID NO: 4648 - DNA, 22 bp, Homo Sapiens
ttcttccaaagcagcctctcgc

SEQ ID NO: 4649 - DNA, 22 bp, Homo Sapiens
tttcttccaaagcagcctctcg

SEQ ID NO: 4650 - DNA, 22 bp, Homo Sapiens
gtttcttccaaagcagcctctc

SEQ ID NO: 4651 - DNA, 22 bp, Homo Sapiens
agtttcttccaaagcagcctct

SEQ ID NO: 4652 - DNA, 22 bp, Homo Sapiens
gagtttcttccaaagcagcctc

SEQ ID NO: 4653 - DNA, 22 bp, Homo Sapiens
tgagtttcttccaaagcagcct

SEQ ID NO: 4654 - DNA, 22 bp, Homo Sapiens
atgagtttcttccaaagcagcc

SEQ ID NO: 4655 - DNA, 22 bp, Homo Sapiens
tatgagtttcttccaaagcagc

SEQ ID NO: 4656 - DNA, 22 bp, Homo Sapiens
ctatgagtttcttccaaagcag

SEQ ID NO: 4657 - DNA, 22 bp, Homo Sapiens
tctatgagtttcttccaaagca

SEQ ID NO: 4658 - DNA, 22 bp, Homo Sapiens
atctatgagtttcttccaaagc

SEQ ID NO: 4659 - DNA, 22 bp, Homo Sapiens
aatctatgagtttcttccaaag

SEQ ID NO: 4660 - DNA, 22 bp, Homo Sapiens
taatctatgagtttcttccaaa

SEQ ID NO: 4661 - DNA, 22 bp, Homo Sapiens
gtaatctatgagtttcttccaa

SEQ ID NO: 4662 - DNA, 22 bp, Homo Sapiens
agtaatctatgagtttcttcca

SEQ ID NO: 4663 - DNA, 23 bp, Homo Sapiens
caaaggaccaaatgttcagatgc

SEQ ID NO: 4664 - DNA, 23 bp, Homo Sapiens
gcaaaggaccaaatgttcagatg

SEQ ID NO: 4665 - DNA, 23 bp, Homo Sapiens
tgcaaaggaccaaatgttcagat

SEQ ID NO: 4666 - DNA, 23 bp, Homo Sapiens
ctgcaaaggaccaaatgttcaga

SEQ ID NO: 4667 - DNA, 23 bp, Homo Sapiens
cctgcaaaggaccaaatgttcag

SEQ ID NO: 4668 - DNA, 23 bp, Homo Sapiens
ccctgcaaaggaccaaatgttca

SEQ ID NO: 4669 - DNA, 23 bp, Homo Sapiens
accctgcaaaggaccaaatgttc

SEQ ID NO: 4670 - DNA, 23 bp, Homo Sapiens
caccctgcaaaggaccaaatgtt

SEQ ID NO: 4671 - DNA, 23 bp, Homo Sapiens
tcaccctgcaaaggaccaaatgt

SEQ ID NO: 4672 - DNA, 23 bp, Homo Sapiens
ctcaccctgcaaaggaccaaatg

SEQ ID NO: 4673 - DNA, 23 bp, Homo Sapiens
actcaccctgcaaaggaccaaat

SEQ ID NO: 4674 - DNA, 23 bp, Homo Sapiens
cactcaccctgcaaaggaccaaa

SEQ ID NO: 4675 - DNA, 23 bp, Homo Sapiens
tcactcaccctgcaaaggaccaa

SEQ ID NO: 4676 - DNA, 23 bp, Homo Sapiens
ctcactcaccctgcaaaggacca

SEQ ID NO: 4677 - DNA, 23 bp, Homo Sapiens
gctcactcaccctgcaaaggacc

SEQ ID NO: 4678 - DNA, 23 bp, Homo Sapiens
cgctcactcaccctgcaaaggac

SEQ ID NO: 4679 - DNA, 23 bp, Homo Sapiens
tcgctcactcaccctgcaaagga

SEQ ID NO: 4680 - DNA, 23 bp, Homo Sapiens
ctcgctcactcaccctgcaaagg

SEQ ID NO: 4681 - DNA, 23 bp, Homo Sapiens
tctcgctcactcaccctgcaaag

SEQ ID NO: 4682 - DNA, 23 bp, Homo Sapiens
ctctcgctcactcaccctgcaaa

SEQ ID NO: 4683 - DNA, 23 bp, Homo Sapiens
cctctcgctcactcaccctgcaa

SEQ ID NO: 4684 - DNA, 23 bp, Homo Sapiens
gcctctcgctcactcaccctgca

SEQ ID NO: 4685 - DNA, 23 bp, Homo Sapiens
agcctctcgctcactcaccctgc

SEQ ID NO: 4686 - DNA, 23 bp, Homo Sapiens
cagcctctcgctcactcaccctg

SEQ ID NO: 4687 - DNA, 23 bp, Homo Sapiens
gcagcctctcgctcactcaccct

SEQ ID NO: 4688 - DNA, 23 bp, Homo Sapiens
agcagcctctcgctcactcaccc

SEQ ID NO: 4689 - DNA, 23 bp, Homo Sapiens
aagcagcctctcgctcactcacc

SEQ ID NO: 4690 - DNA, 23 bp, Homo Sapiens
aaagcagcctctcgctcactcac

SEQ ID NO: 4691 - DNA, 23 bp, Homo Sapiens
caaagcagcctctcgctcactca

SEQ ID NO: 4692 - DNA, 23 bp, Homo Sapiens
ccaaagcagcctctcgctcactc

SEQ ID NO: 4693 - DNA, 23 bp, Homo Sapiens
tccaaagcagcctctcgctcact

SEQ ID NO: 4694 - DNA, 23 bp, Homo Sapiens
ttccaaagcagcctctcgctcac

SEQ ID NO: 4695 - DNA, 23 bp, Homo Sapiens
cttccaaagcagcctctcgctca

SEQ ID NO: 4696 - DNA, 23 bp, Homo Sapiens
tcttccaaagcagcctctcgctc

SEQ ID NO: 4697 - DNA, 23 bp, Homo Sapiens
ttcttccaaagcagcctctcgct

SEQ ID NO: 4698 - DNA, 23 bp, Homo Sapiens
tttcttccaaagcagcctctcgc

SEQ ID NO: 4699 - DNA, 23 bp, Homo Sapiens
gtttcttccaaagcagcctctcg

SEQ ID NO: 4700 - DNA, 23 bp, Homo Sapiens
agtttcttccaaagcagcctctc

SEQ ID NO: 4701 - DNA, 23 bp, Homo Sapiens
gagtttcttccaaagcagcctct

SEQ ID NO: 4702 - DNA, 23 bp, Homo Sapiens
tgagtttcttccaaagcagcctc

SEQ ID NO: 4703 - DNA, 23 bp, Homo Sapiens
atgagtttcttccaaagcagcct

SEQ ID NO: 4704 - DNA, 23 bp, Homo Sapiens
tatgagtttcttccaaagcagcc

SEQ ID NO: 4705 - DNA, 23 bp, Homo Sapiens
ctatgagtttcttccaaagcagc

SEQ ID NO: 4706 - DNA, 23 bp, Homo Sapiens
tctatgagtttcttccaaagcag

SEQ ID NO: 4707 - DNA, 23 bp, Homo Sapiens
atctatgagtttcttccaaagca

SEQ ID NO: 4708 - DNA, 23 bp, Homo Sapiens
aatctatgagtttcttccaaagc

SEQ ID NO: 4709 - DNA, 23 bp, Homo Sapiens
taatctatgagtttcttccaaag

SEQ ID NO: 4710 - DNA, 23 bp, Homo Sapiens
gtaatctatgagtttcttccaaa

SEQ ID NO: 4711 - DNA, 23 bp, Homo Sapiens
agtaatctatgagtttcttccaa

SEQ ID NO: 4712 - DNA, 23 bp, Homo Sapiens
cagtaatctatgagtttcttcca

SEQ ID NO: 4713 - DNA, 24 bp, Homo Sapiens
caaaggaccaaatgttcagatgca

SEQ ID NO: 4714 - DNA, 24 bp, Homo Sapiens
gcaaaggaccaaatgttcagatgc

SEQ ID NO: 4715 - DNA, 24 bp, Homo Sapiens
tgcaaaggaccaaatgttcagatg

SEQ ID NO: 4716 - DNA, 24 bp, Homo Sapiens
ctgcaaaggaccaaatgttcagat

SEQ ID NO: 4717 - DNA, 24 bp, Homo Sapiens
cctgcaaaggaccaaatgttcaga

SEQ ID NO: 4718 - DNA, 24 bp, Homo Sapiens
ccctgcaaaggaccaaatgttcag

SEQ ID NO: 4719 - DNA, 24 bp, Homo Sapiens
accctgcaaaggaccaaatgttca

SEQ ID NO: 4720 - DNA, 24 bp, Homo Sapiens
caccctgcaaaggaccaaatgttc

SEQ ID NO: 4721 - DNA, 24 bp, Homo Sapiens
tcaccctgcaaaggaccaaatgtt

SEQ ID NO: 4722 - DNA, 24 bp, Homo Sapiens
ctcaccctgcaaaggaccaaatgt

SEQ ID NO: 4723 - DNA, 24 bp, Homo Sapiens
actcaccctgcaaaggaccaaatg

SEQ ID NO: 4724 - DNA, 24 bp, Homo Sapiens
cactcaccctgcaaaggaccaaat

SEQ ID NO: 4725 - DNA, 24 bp, Homo Sapiens
tcactcaccctgcaaaggaccaaa

SEQ ID NO: 4726 - DNA, 24 bp, Homo Sapiens
ctcactcaccctgcaaaggaccaa

SEQ ID NO: 4727 - DNA, 24 bp, Homo Sapiens
gctcactcaccctgcaaaggacca

SEQ ID NO: 4728 - DNA, 24 bp, Homo Sapiens
cgctcactcaccctgcaaaggacc

SEQ ID NO: 4729 - DNA, 24 bp, Homo Sapiens
tcgctcactcaccctgcaaaggac

SEQ ID NO: 4730 - DNA, 24 bp, Homo Sapiens
ctcgctcactcaccctgcaaagga

SEQ ID NO: 4731 - DNA, 24 bp, Homo Sapiens
tctcgctcactcaccctgcaaagg

SEQ ID NO: 4732 - DNA, 24 bp, Homo Sapiens
ctctcgctcactcaccctgcaaag

SEQ ID NO: 4733 - DNA, 24 bp, Homo Sapiens
cctctcgctcactcaccctgcaaa

SEQ ID NO: 4734 - DNA, 24 bp, Homo Sapiens
gcctctcgctcactcaccctgcaa

SEQ ID NO: 4735 - DNA, 24 bp, Homo Sapiens
agcctctcgctcactcaccctgca

SEQ ID NO: 4736 - DNA, 24 bp, Homo Sapiens
cagcctctcgctcactcaccctgc

SEQ ID NO: 4737 - DNA, 24 bp, Homo Sapiens
gcagcctctcgctcactcaccctg

SEQ ID NO: 4738 - DNA, 24 bp, Homo Sapiens
agcagcctctcgctcactcaccct

SEQ ID NO: 4739 - DNA, 24 bp, Homo Sapiens
aagcagcctctcgctcactcaccc

SEQ ID NO: 4740 - DNA, 24 bp, Homo Sapiens
aaagcagcctctcgctcactcacc

SEQ ID NO: 4741 - DNA, 24 bp, Homo Sapiens
caaagcagcctctcgctcactcac

SEQ ID NO: 4742 - DNA, 24 bp, Homo Sapiens
ccaaagcagcctctcgctcactca

SEQ ID NO: 4743 - DNA, 24 bp, Homo Sapiens
tccaaagcagcctctcgctcactc

SEQ ID NO: 4744 - DNA, 24 bp, Homo Sapiens
ttccaaagcagcctctcgctcact

SEQ ID NO: 4745 - DNA, 24 bp, Homo Sapiens
cttccaaagcagcctctcgctcac

SEQ ID NO: 4746 - DNA, 24 bp, Homo Sapiens
tcttccaaagcagcctctcgctca

SEQ ID NO: 4747 - DNA, 24 bp, Homo Sapiens
ttcttccaaagcagcctctcgctc

SEQ ID NO: 4748 - DNA, 24 bp, Homo Sapiens
tttcttccaaagcagcctctcgct

SEQ ID NO: 4749 - DNA, 24 bp, Homo Sapiens
gtttcttccaaagcagcctctcgc

SEQ ID NO: 4750 - DNA, 24 bp, Homo Sapiens
agtttcttccaaagcagcctctcg

SEQ ID NO: 4751 - DNA, 24 bp, Homo Sapiens
gagtttcttccaaagcagcctctc

SEQ ID NO: 4752 - DNA, 24 bp, Homo Sapiens
tgagtttcttccaaagcagcctct

SEQ ID NO: 4753 - DNA, 24 bp, Homo Sapiens
atgagtttcttccaaagcagcctc

SEQ ID NO: 4754 - DNA, 24 bp, Homo Sapiens
tatgagtttcttccaaagcagcct

SEQ ID NO: 4755 - DNA, 24 bp, Homo Sapiens
ctatgagtttcttccaaagcagcc

SEQ ID NO: 4756 - DNA, 24 bp, Homo Sapiens
tctatgagtttcttccaaagcagc

SEQ ID NO: 4757 - DNA, 24 bp, Homo Sapiens
atctatgagtttcttccaaagcag

SEQ ID NO: 4758 - DNA, 24 bp, Homo Sapiens
aatctatgagtttcttccaaagca

SEQ ID NO: 4759 - DNA, 24 bp, Homo Sapiens
taatctatgagtttcttccaaagc

SEQ ID NO: 4760 - DNA, 24 bp, Homo Sapiens
gtaatctatgagtttcttccaaag

SEQ ID NO: 4761 - DNA, 24 bp, Homo Sapiens
agtaatctatgagtttcttccaaa

SEQ ID NO: 4762 - DNA, 24 bp, Homo Sapiens
cagtaatctatgagtttcttccaa

SEQ ID NO: 4763 - DNA, 24 bp, Homo Sapiens
gcagtaatctatgagtttcttcca

SEQ ID NO: 4764 - DNA, 25 bp, Homo Sapiens
caaaggaccaaatgttcagatgcaa

SEQ ID NO: 4765 - DNA, 25 bp, Homo Sapiens
gcaaaggaccaaatgttcagatgca

SEQ ID NO: 4766 - DNA, 25 bp, Homo Sapiens
tgcaaaggaccaaatgttcagatgc

SEQ ID NO: 4767 - DNA, 25 bp, Homo Sapiens
ctgcaaaggaccaaatgttcagatg

SEQ ID NO: 4768 - DNA, 25 bp, Homo Sapiens
cctgcaaaggaccaaatgttcagat

SEQ ID NO: 4769 - DNA, 25 bp, Homo Sapiens
ccctgcaaaggaccaaatgttcaga

SEQ ID NO: 4770 - DNA, 25 bp, Homo Sapiens
accctgcaaaggaccaaatgttcag

SEQ ID NO: 4771 - DNA, 25 bp, Homo Sapiens
caccctgcaaaggaccaaatgttca

SEQ ID NO: 4772 - DNA, 25 bp, Homo Sapiens
tcaccctgcaaaggaccaaatgttc

SEQ ID NO: 4773 - DNA, 25 bp, Homo Sapiens
ctcaccctgcaaaggaccaaatgtt

SEQ ID NO: 4774 - DNA, 25 bp, Homo Sapiens
actcaccctgcaaaggaccaaatgt

SEQ ID NO: 4775 - DNA, 25 bp, Homo Sapiens
cactcaccctgcaaaggaccaaatg

SEQ ID NO: 4776 - DNA, 25 bp, Homo Sapiens
tcactcaccctgcaaaggaccaaat

SEQ ID NO: 4777 - DNA, 25 bp, Homo Sapiens
ctcactcaccctgcaaaggaccaaa

SEQ ID NO: 4778 - DNA, 25 bp, Homo Sapiens
gctcactcaccctgcaaaggaccaa

SEQ ID NO: 4779 - DNA, 25 bp, Homo Sapiens
cgctcactcaccctgcaaaggacca

SEQ ID NO: 4780 - DNA, 25 bp, Homo Sapiens
tcgctcactcaccctgcaaaggacc

SEQ ID NO: 4781 - DNA, 25 bp, Homo Sapiens
ctcgctcactcaccctgcaaaggac

SEQ ID NO: 4782 - DNA, 25 bp, Homo Sapiens
tctcgctcactcaccctgcaaagga

SEQ ID NO: 4783 - DNA, 25 bp, Homo Sapiens
ctctcgctcactcaccctgcaaagg

SEQ ID NO: 4784 - DNA, 25 bp, Homo Sapiens
cctctcgctcactcaccctgcaaag

SEQ ID NO: 4785 - DNA, 25 bp, Homo Sapiens
gcctctcgctcactcaccctgcaaa

SEQ ID NO: 4786 - DNA, 25 bp, Homo Sapiens
agcctctcgctcactcaccctgcaa

SEQ ID NO: 4787 - DNA, 25 bp, Homo Sapiens
cagcctctcgctcactcaccctgca

SEQ ID NO: 4788 - DNA, 25 bp, Homo Sapiens
gcagcctctcgctcactcaccctgc

SEQ ID NO: 4789 - DNA, 25 bp, Homo Sapiens
agcagcctctcgctcactcaccctg

SEQ ID NO: 4790 - DNA, 25 bp, Homo Sapiens
aagcagcctctcgctcactcaccct

SEQ ID NO: 4791 - DNA, 25 bp, Homo Sapiens
aaagcagcctctcgctcactcaccc

SEQ ID NO: 4792 - DNA, 25 bp, Homo Sapiens
caaagcagcctctcgctcactcacc

SEQ ID NO: 4793 - DNA, 25 bp, Homo Sapiens
ccaaagcagcctctcgctcactcac

SEQ ID NO: 4794 - DNA, 25 bp, Homo Sapiens
tccaaagcagcctctcgctcactca

SEQ ID NO: 4795 - DNA, 25 bp, Homo Sapiens
ttccaaagcagcctctcgctcactc

SEQ ID NO: 4796 - DNA, 25 bp, Homo Sapiens
cttccaaagcagcctctcgctcact

SEQ ID NO: 4797 - DNA, 25 bp, Homo Sapiens
tcttccaaagcagcctctcgctcac

SEQ ID NO: 4798 - DNA, 25 bp, Homo Sapiens
ttcttccaaagcagcctctcgctca

SEQ ID NO: 4799 - DNA, 25 bp, Homo Sapiens
tttcttccaaagcagcctctcgctc

SEQ ID NO: 4800 - DNA, 25 bp, Homo Sapiens
gtttcttccaaagcagcctctcgct

SEQ ID NO: 4801 - DNA, 25 bp, Homo Sapiens
agtttcttccaaagcagcctctcgc

SEQ ID NO: 4802 - DNA, 25 bp, Homo Sapiens
gagtttcttccaaagcagcctctcg

SEQ ID NO: 4803 - DNA, 25 bp, Homo Sapiens
tgagtttcttccaaagcagcctctc

SEQ ID NO: 4804 - DNA, 25 bp, Homo Sapiens
atgagtttcttccaaagcagcctct

SEQ ID NO: 4805 - DNA, 25 bp, Homo Sapiens
tatgagtttcttccaaagcagcctc

SEQ ID NO: 4806 - DNA, 25 bp, Homo Sapiens
ctatgagtttcttccaaagcagcct

SEQ ID NO: 4807 - DNA, 25 bp, Homo Sapiens
tctatgagtttcttccaaagcagcc

SEQ ID NO: 4808 - DNA, 25 bp, Homo Sapiens
atctatgagtttcttccaaagcagc

SEQ ID NO: 4809 - DNA, 25 bp, Homo Sapiens
aatctatgagtttcttccaaagcag

SEQ ID NO: 4810 - DNA, 25 bp, Homo Sapiens
taatctatgagtttcttccaaagca

SEQ ID NO: 4811 - DNA, 25 bp, Homo Sapiens
gtaatctatgagtttcttccaaagc

SEQ ID NO: 4812 - DNA, 25 bp, Homo Sapiens
agtaatctatgagtttcttccaaag

SEQ ID NO: 4813 - DNA, 25 bp, Homo Sapiens
cagtaatctatgagtttcttccaaa

SEQ ID NO: 4814 - DNA, 25 bp, Homo Sapiens
gcagtaatctatgagtttcttccaa

SEQ ID NO: 4815 - DNA, 25 bp, Homo Sapiens
tgcagtaatctatgagtttcttcca

SEQ ID NO: 4816 - DNA, 26 bp, Homo Sapiens
caaaggaccaaatgttcagatgcaat

SEQ ID NO: 4817 - DNA, 26 bp, Homo Sapiens
gcaaaggaccaaatgttcagatgcaa

SEQ ID NO: 4818 - DNA, 26 bp, Homo Sapiens
tgcaaaggaccaaatgttcagatgca

SEQ ID NO: 4819 - DNA, 26 bp, Homo Sapiens
ctgcaaaggaccaaatgttcagatgc

SEQ ID NO: 4820 - DNA, 26 bp, Homo Sapiens
cctgcaaaggaccaaatgttcagatg

SEQ ID NO: 4821 - DNA, 26 bp, Homo Sapiens
ccctgcaaaggaccaaatgttcagat

SEQ ID NO: 4822 - DNA, 26 bp, Homo Sapiens
accctgcaaaggaccaaatgttcaga

SEQ ID NO: 4823 - DNA, 26 bp, Homo Sapiens
caccctgcaaaggaccaaatgttcag

SEQ ID NO: 4824 - DNA, 26 bp, Homo Sapiens
tcaccctgcaaaggaccaaatgttca

SEQ ID NO: 4825 - DNA, 26 bp, Homo Sapiens
ctcaccctgcaaaggaccaaatgttc

SEQ ID NO: 4826 - DNA, 26 bp, Homo Sapiens
actcaccctgcaaaggaccaaatgtt

SEQ ID NO: 4827 - DNA, 26 bp, Homo Sapiens
cactcaccctgcaaaggaccaaatgt

SEQ ID NO: 4828 - DNA, 26 bp, Homo Sapiens
tcactcaccctgcaaaggaccaaatg

SEQ ID NO: 4829 - DNA, 26 bp, Homo Sapiens
ctcactcaccctgcaaaggaccaaat

SEQ ID NO: 4830 - DNA, 26 bp, Homo Sapiens
gctcactcaccctgcaaaggaccaaa

SEQ ID NO: 4831 - DNA, 26 bp, Homo Sapiens
cgctcactcaccctgcaaaggaccaa

SEQ ID NO: 4832 - DNA, 26 bp, Homo Sapiens
tcgctcactcaccctgcaaaggacca

SEQ ID NO: 4833 - DNA, 26 bp, Homo Sapiens
ctcgctcactcaccctgcaaaggacc

SEQ ID NO: 4834 - DNA, 26 bp, Homo Sapiens
tctcgctcactcaccctgcaaaggac

SEQ ID NO: 4835 - DNA, 26 bp, Homo Sapiens
ctctcgctcactcaccctgcaaagga

SEQ ID NO: 4836 - DNA, 26 bp, Homo Sapiens
cctctcgctcactcaccctgcaaagg

SEQ ID NO: 4837 - DNA, 26 bp, Homo Sapiens
gcctctcgctcactcaccctgcaaag

SEQ ID NO: 4838 - DNA, 26 bp, Homo Sapiens
agcctctcgctcactcaccctgcaaa

SEQ ID NO: 4839 - DNA, 26 bp, Homo Sapiens
cagcctctcgctcactcaccctgcaa

SEQ ID NO: 4840 - DNA, 26 bp, Homo Sapiens
gcagcctctcgctcactcaccctgca

SEQ ID NO: 4841 - DNA, 26 bp, Homo Sapiens
agcagcctctcgctcactcaccctgc

SEQ ID NO: 4842 - DNA, 26 bp, Homo Sapiens
aagcagcctctcgctcactcaccctg

SEQ ID NO: 4843 - DNA, 26 bp, Homo Sapiens
aaagcagcctctcgctcactcaccct

SEQ ID NO: 4844 - DNA, 26 bp, Homo Sapiens
caaagcagcctctcgctcactcaccc

SEQ ID NO: 4845 - DNA, 26 bp, Homo Sapiens
ccaaagcagcctctcgctcactcacc

SEQ ID NO: 4846 - DNA, 26 bp, Homo Sapiens
tccaaagcagcctctcgctcactcac

SEQ ID NO: 4847 - DNA, 26 bp, Homo Sapiens
ttccaaagcagcctctcgctcactca

SEQ ID NO: 4848 - DNA, 26 bp, Homo Sapiens
cttccaaagcagcctctcgctcactc

SEQ ID NO: 4849 - DNA, 26 bp, Homo Sapiens
tcttccaaagcagcctctcgctcact

SEQ ID NO: 4850 - DNA, 26 bp, Homo Sapiens
ttcttccaaagcagcctctcgctcac

SEQ ID NO: 4851 - DNA, 26 bp, Homo Sapiens
tttcttccaaagcagcctctcgctca

SEQ ID NO: 4852 - DNA, 26 bp, Homo Sapiens
gtttcttccaaagcagcctctcgctc

SEQ ID NO: 4853 - DNA, 26 bp, Homo Sapiens
agtttcttccaaagcagcctctcgct

SEQ ID NO: 4854 - DNA, 26 bp, Homo Sapiens
gagtttcttccaaagcagcctctcgc

SEQ ID NO: 4855 - DNA, 26 bp, Homo Sapiens
tgagtttcttccaaagcagcctctcg

SEQ ID NO: 4856 - DNA, 26 bp, Homo Sapiens
atgagtttcttccaaagcagcctctc

SEQ ID NO: 4857 - DNA, 26 bp, Homo Sapiens
tatgagtttcttccaaagcagcctct

SEQ ID NO: 4858 - DNA, 26 bp, Homo Sapiens
ctatgagtttcttccaaagcagcctc

SEQ ID NO: 4859 - DNA, 26 bp, Homo Sapiens
tctatgagtttcttccaaagcagcct

SEQ ID NO: 4860 - DNA, 26 bp, Homo Sapiens
atctatgagtttcttccaaagcagcc

SEQ ID NO: 4861 - DNA, 26 bp, Homo Sapiens
aatctatgagtttcttccaaagcagc

SEQ ID NO: 4862 - DNA, 26 bp, Homo Sapiens
taatctatgagtttcttccaaagcag

SEQ ID NO: 4863 - DNA, 26 bp, Homo Sapiens
gtaatctatgagtttcttccaaagca

SEQ ID NO: 4864 - DNA, 26 bp, Homo Sapiens
agtaatctatgagtttcttccaaagc

SEQ ID NO: 4865 - DNA, 26 bp, Homo Sapiens
cagtaatctatgagtttcttccaaag

SEQ ID NO: 4866 - DNA, 26 bp, Homo Sapiens
gcagtaatctatgagtttcttccaaa

SEQ ID NO: 4867 - DNA, 26 bp, Homo Sapiens
tgcagtaatctatgagtttcttccaa

SEQ ID NO: 4868 - DNA, 26 bp, Homo Sapiens
ttgcagtaatctatgagtttcttcca

SEQ ID NO: 4869 - DNA, 27 bp, Homo Sapiens
caaaggaccaaatgttcagatgcaatt

SEQ ID NO: 4870 - DNA, 27 bp, Homo Sapiens
gcaaaggaccaaatgttcagatgcaat

SEQ ID NO: 4871 - DNA, 27 bp, Homo Sapiens
tgcaaaggaccaaatgttcagatgcaa

SEQ ID NO: 4872 - DNA, 27 bp, Homo Sapiens
ctgcaaaggaccaaatgttcagatgca

SEQ ID NO: 4873 - DNA, 27 bp, Homo Sapiens
cctgcaaaggaccaaatgttcagatgc

SEQ ID NO: 4874 - DNA, 27 bp, Homo Sapiens
ccctgcaaaggaccaaatgttcagatg

SEQ ID NO: 4875 - DNA, 27 bp, Homo Sapiens
accctgcaaaggaccaaatgttcagat

SEQ ID NO: 4876 - DNA, 27 bp, Homo Sapiens
caccctgcaaaggaccaaatgttcaga

SEQ ID NO: 4877 - DNA, 27 bp, Homo Sapiens
tcaccctgcaaaggaccaaatgttcag

SEQ ID NO: 4878 - DNA, 27 bp, Homo Sapiens
ctcaccctgcaaaggaccaaatgttca

SEQ ID NO: 4879 - DNA, 27 bp, Homo Sapiens
actcaccctgcaaaggaccaaatgttc

SEQ ID NO: 4880 - DNA, 27 bp, Homo Sapiens
cactcaccctgcaaaggaccaaatgtt

SEQ ID NO: 4881 - DNA, 27 bp, Homo Sapiens
tcactcaccctgcaaaggaccaaatgt

SEQ ID NO: 4882 - DNA, 27 bp, Homo Sapiens
ctcactcaccctgcaaaggaccaaatg

SEQ ID NO: 4883 - DNA, 27 bp, Homo Sapiens
gctcactcaccctgcaaaggaccaaat

SEQ ID NO: 4884 - DNA, 27 bp, Homo Sapiens
cgctcactcaccctgcaaaggaccaaa

SEQ ID NO: 4885 - DNA, 27 bp, Homo Sapiens
tcgctcactcaccctgcaaaggaccaa

SEQ ID NO: 4886 - DNA, 27 bp, Homo Sapiens
ctcgctcactcaccctgcaaaggacca

SEQ ID NO: 4887 - DNA, 27 bp, Homo Sapiens
tctcgctcactcaccctgcaaaggacc

SEQ ID NO: 4888 - DNA, 27 bp, Homo Sapiens
ctctcgctcactcaccctgcaaaggac

SEQ ID NO: 4889 - DNA, 27 bp, Homo Sapiens
cctctcgctcactcaccctgcaaagga

SEQ ID NO: 4890 - DNA, 27 bp, Homo Sapiens
gcctctcgctcactcaccctgcaaagg

SEQ ID NO: 4891 - DNA, 27 bp, Homo Sapiens
agcctctcgctcactcaccctgcaaag

SEQ ID NO: 4892 - DNA, 27 bp, Homo Sapiens
cagcctctcgctcactcaccctgcaaa

SEQ ID NO: 4893 - DNA, 27 bp, Homo Sapiens
gcagcctctcgctcactcaccctgcaa

SEQ ID NO: 4894 - DNA, 27 bp, Homo Sapiens
agcagcctctcgctcactcaccctgca

SEQ ID NO: 4895 - DNA, 27 bp, Homo Sapiens
aagcagcctctcgctcactcaccctgc

SEQ ID NO: 4896 - DNA, 27 bp, Homo Sapiens
aaagcagcctctcgctcactcaccctg

SEQ ID NO: 4897 - DNA, 27 bp, Homo Sapiens
caaagcagcctctcgctcactcaccct

SEQ ID NO: 4898 - DNA, 27 bp, Homo Sapiens
ccaaagcagcctctcgctcactcaccc

SEQ ID NO: 4899 - DNA, 27 bp, Homo Sapiens
tccaaagcagcctctcgctcactcacc

SEQ ID NO: 4900 - DNA, 27 bp, Homo Sapiens
ttccaaagcagcctctcgctcactcac

SEQ ID NO: 4901 - DNA, 27 bp, Homo Sapiens
cttccaaagcagcctctcgctcactca

SEQ ID NO: 4902 - DNA, 27 bp, Homo Sapiens
tcttccaaagcagcctctcgctcactc

SEQ ID NO: 4903 - DNA, 27 bp, Homo Sapiens
ttcttccaaagcagcctctcgctcact

SEQ ID NO: 4904 - DNA, 27 bp, Homo Sapiens
tttcttccaaagcagcctctcgctcac

SEQ ID NO: 4905 - DNA, 27 bp, Homo Sapiens
gtttcttccaaagcagcctctcgctca

SEQ ID NO: 4906 - DNA, 27 bp, Homo Sapiens
agtttcttccaaagcagcctctcgctc

SEQ ID NO: 4907 - DNA, 27 bp, Homo Sapiens
gagtttcttccaaagcagcctctcgct

SEQ ID NO: 4908 - DNA, 27 bp, Homo Sapiens
tgagtttcttccaaagcagcctctcgc

SEQ ID NO: 4909 - DNA, 27 bp, Homo Sapiens
atgagtttcttccaaagcagcctctcg

SEQ ID NO: 4910 - DNA, 27 bp, Homo Sapiens
tatgagtttcttccaaagcagcctctc

SEQ ID NO: 4911 - DNA, 27 bp, Homo Sapiens
ctatgagtttcttccaaagcagcctct

SEQ ID NO: 4912 - DNA, 27 bp, Homo Sapiens
tctatgagtttcttccaaagcagcctc

SEQ ID NO: 4913 - DNA, 27 bp, Homo Sapiens
atctatgagtttcttccaaagcagcct

SEQ ID NO: 4914 - DNA, 27 bp, Homo Sapiens
aatctatgagtttcttccaaagcagcc

SEQ ID NO: 4915 - DNA, 27 bp, Homo Sapiens
taatctatgagtttcttccaaagcagc

SEQ ID NO: 4916 - DNA, 27 bp, Homo Sapiens
gtaatctatgagtttcttccaaagcag

SEQ ID NO: 4917 - DNA, 27 bp, Homo Sapiens
agtaatctatgagtttcttccaaagca

SEQ ID NO: 4918 - DNA, 27 bp, Homo Sapiens
cagtaatctatgagtttcttccaaagc

SEQ ID NO: 4919 - DNA, 27 bp, Homo Sapiens
gcagtaatctatgagtttcttccaaag

SEQ ID NO: 4920 - DNA, 27 bp, Homo Sapiens
tgcagtaatctatgagtttcttccaaa

SEQ ID NO: 4921 - DNA, 27 bp, Homo Sapiens
ttgcagtaatctatgagtttcttccaa

SEQ ID NO: 4922 - DNA, 27 bp, Homo Sapiens
gttgcagtaatctatgagtttcttcca

SEQ ID NO: 4923 - DNA, 28 bp, Homo Sapiens
caaaggaccaaatgttcagatgcaatta

SEQ ID NO: 4924 - DNA, 28 bp, Homo Sapiens
gcaaaggaccaaatgttcagatgcaatt

SEQ ID NO: 4925 - DNA, 28 bp, Homo Sapiens
tgcaaaggaccaaatgttcagatgcaat

SEQ ID NO: 4926 - DNA, 28 bp, Homo Sapiens
ctgcaaaggaccaaatgttcagatgcaa

SEQ ID NO: 4927 - DNA, 28 bp, Homo Sapiens
cctgcaaaggaccaaatgttcagatgca

SEQ ID NO: 4928 - DNA, 28 bp, Homo Sapiens
ccctgcaaaggaccaaatgttcagatgc

SEQ ID NO: 4929 - DNA, 28 bp, Homo Sapiens
accctgcaaaggaccaaatgttcagatg

SEQ ID NO: 4930 - DNA, 28 bp, Homo Sapiens
caccctgcaaaggaccaaatgttcagat

SEQ ID NO: 4931 - DNA, 28 bp, Homo Sapiens
tcaccctgcaaaggaccaaatgttcaga

SEQ ID NO: 4932 - DNA, 28 bp, Homo Sapiens
ctcaccctgcaaaggaccaaatgttcag

SEQ ID NO: 4933 - DNA, 28 bp, Homo Sapiens
actcaccctgcaaaggaccaaatgttca

SEQ ID NO: 4934 - DNA, 28 bp, Homo Sapiens
cactcaccctgcaaaggaccaaatgttc

SEQ ID NO: 4935 - DNA, 28 bp, Homo Sapiens
tcactcaccctgcaaaggaccaaatgtt

SEQ ID NO: 4936 - DNA, 28 bp, Homo Sapiens
ctcactcaccctgcaaaggaccaaatgt

SEQ ID NO: 4937 - DNA, 28 bp, Homo Sapiens
gctcactcaccctgcaaaggaccaaatg

SEQ ID NO: 4938 - DNA, 28 bp, Homo Sapiens
cgctcactcaccctgcaaaggaccaaat

SEQ ID NO: 4939 - DNA, 28 bp, Homo Sapiens
tcgctcactcaccctgcaaaggaccaaa

SEQ ID NO: 4940 - DNA, 28 bp, Homo Sapiens
ctcgctcactcaccctgcaaaggaccaa

SEQ ID NO: 4941 - DNA, 28 bp, Homo Sapiens
tctcgctcactcaccctgcaaaggacca

SEQ ID NO: 4942 - DNA, 28 bp, Homo Sapiens
ctctcgctcactcaccctgcaaaggacc

SEQ ID NO: 4943 - DNA, 28 bp, Homo Sapiens
cctctcgctcactcaccctgcaaaggac

SEQ ID NO: 4944 - DNA, 28 bp, Homo Sapiens
gcctctcgctcactcaccctgcaaagga

SEQ ID NO: 4945 - DNA, 28 bp, Homo Sapiens
agcctctcgctcactcaccctgcaaagg

SEQ ID NO: 4946 - DNA, 28 bp, Homo Sapiens
cagcctctcgctcactcaccctgcaaag

SEQ ID NO: 4947 - DNA, 28 bp, Homo Sapiens
gcagcctctcgctcactcaccctgcaaa

SEQ ID NO: 4948 - DNA, 28 bp, Homo Sapiens
agcagcctctcgctcactcaccctgcaa

SEQ ID NO: 4949 - DNA, 28 bp, Homo Sapiens
aagcagcctctcgctcactcaccctgca

SEQ ID NO: 4950 - DNA, 28 bp, Homo Sapiens
aaagcagcctctcgctcactcaccctgc

SEQ ID NO: 4951 - DNA, 28 bp, Homo Sapiens
caaagcagcctctcgctcactcaccctg

SEQ ID NO: 4952 - DNA, 28 bp, Homo Sapiens
ccaaagcagcctctcgctcactcaccct

SEQ ID NO: 4953 - DNA, 28 bp, Homo Sapiens
tccaaagcagcctctcgctcactcaccc

SEQ ID NO: 4954 - DNA, 28 bp, Homo Sapiens
ttccaaagcagcctctcgctcactcacc

SEQ ID NO: 4955 - DNA, 28 bp, Homo Sapiens
cttccaaagcagcctctcgctcactcac

SEQ ID NO: 4956 - DNA, 28 bp, Homo Sapiens
tcttccaaagcagcctctcgctcactca

SEQ ID NO: 4957 - DNA, 28 bp, Homo Sapiens
ttcttccaaagcagcctctcgctcactc

SEQ ID NO: 4958 - DNA, 28 bp, Homo Sapiens
tttcttccaaagcagcctctcgctcact

SEQ ID NO: 4959 - DNA, 28 bp, Homo Sapiens
gtttcttccaaagcagcctctcgctcac

SEQ ID NO: 4960 - DNA, 28 bp, Homo Sapiens
agtttcttccaaagcagcctctcgctca

SEQ ID NO: 4961 - DNA, 28 bp, Homo Sapiens
gagtttcttccaaagcagcctctcgctc

SEQ ID NO: 4962 - DNA, 28 bp, Homo Sapiens
tgagtttcttccaaagcagcctctcgct

SEQ ID NO: 4963 - DNA, 28 bp, Homo Sapiens
atgagtttcttccaaagcagcctctcgc

SEQ ID NO: 4964 - DNA, 28 bp, Homo Sapiens
tatgagtttcttccaaagcagcctctcg

SEQ ID NO: 4965 - DNA, 28 bp, Homo Sapiens
ctatgagtttcttccaaagcagcctctc

SEQ ID NO: 4966 - DNA, 28 bp, Homo Sapiens
tctatgagtttcttccaaagcagcctct

SEQ ID NO: 4967 - DNA, 28 bp, Homo Sapiens
atctatgagtttcttccaaagcagcctc

SEQ ID NO: 4968 - DNA, 28 bp, Homo Sapiens
aatctatgagtttcttccaaagcagcct

SEQ ID NO: 4969 - DNA, 28 bp, Homo Sapiens
taatctatgagtttcttccaaagcagcc

SEQ ID NO: 4970 - DNA, 28 bp, Homo Sapiens
gtaatctatgagtttcttccaaagcagc

SEQ ID NO: 4971 - DNA, 28 bp, Homo Sapiens
agtaatctatgagtttcttccaaagcag

SEQ ID NO: 4972 - DNA, 28 bp, Homo Sapiens
cagtaatctatgagtttcttccaaagca

SEQ ID NO: 4973 - DNA, 28 bp, Homo Sapiens
gcagtaatctatgagtttcttccaaagc

SEQ ID NO: 4974 - DNA, 28 bp, Homo Sapiens
tgcagtaatctatgagtttcttccaaag

SEQ ID NO: 4975 - DNA, 28 bp, Homo Sapiens
ttgcagtaatctatgagtttcttccaaa

SEQ ID NO: 4976 - DNA, 28 bp, Homo Sapiens
gttgcagtaatctatgagtttcttccaa

SEQ ID NO: 4977 - DNA, 28 bp, Homo Sapiens
tgttgcagtaatctatgagtttcttcca

SEQ ID NO: 4978 - DNA, 29 bp, Homo Sapiens
caaaggaccaaatgttcagatgcaattat

SEQ ID NO: 4979 - DNA, 29 bp, Homo Sapiens
gcaaaggaccaaatgttcagatgcaatta

SEQ ID NO: 4980 - DNA, 29 bp, Homo Sapiens
tgcaaaggaccaaatgttcagatgcaatt

SEQ ID NO: 4981 - DNA, 29 bp, Homo Sapiens
ctgcaaaggaccaaatgttcagatgcaat

SEQ ID NO: 4982 - DNA, 29 bp, Homo Sapiens
cctgcaaaggaccaaatgttcagatgcaa

SEQ ID NO: 4983 - DNA, 29 bp, Homo Sapiens
ccctgcaaaggaccaaatgttcagatgca

SEQ ID NO: 4984 - DNA, 29 bp, Homo Sapiens
accctgcaaaggaccaaatgttcagatgc

SEQ ID NO: 4985 - DNA, 29 bp, Homo Sapiens
caccctgcaaaggaccaaatgttcagatg

SEQ ID NO: 4986 - DNA, 29 bp, Homo Sapiens
tcaccctgcaaaggaccaaatgttcagat

SEQ ID NO: 4987 - DNA, 29 bp, Homo Sapiens
ctcaccctgcaaaggaccaaatgttcaga

SEQ ID NO: 4988 - DNA, 29 bp, Homo Sapiens
actcaccctgcaaaggaccaaatgttcag

SEQ ID NO: 4989 - DNA, 29 bp, Homo Sapiens
cactcaccctgcaaaggaccaaatgttca

SEQ ID NO: 4990 - DNA, 29 bp, Homo Sapiens
tcactcaccctgcaaaggaccaaatgttc

SEQ ID NO: 4991 - DNA, 29 bp, Homo Sapiens
ctcactcaccctgcaaaggaccaaatgtt

SEQ ID NO: 4992 - DNA, 29 bp, Homo Sapiens
gctcactcaccctgcaaaggaccaaatgt

SEQ ID NO: 4993 - DNA, 29 bp, Homo Sapiens
cgctcactcaccctgcaaaggaccaaatg

SEQ ID NO: 4994 - DNA, 29 bp, Homo Sapiens
tcgctcactcaccctgcaaaggaccaaat

SEQ ID NO: 4995 - DNA, 29 bp, Homo Sapiens
ctcgctcactcaccctgcaaaggaccaaa

SEQ ID NO: 4996 - DNA, 29 bp, Homo Sapiens
tctcgctcactcaccctgcaaaggaccaa

SEQ ID NO: 4997 - DNA, 29 bp, Homo Sapiens
ctctcgctcactcaccctgcaaaggacca

SEQ ID NO: 4998 - DNA, 29 bp, Homo Sapiens
cctctcgctcactcaccctgcaaaggacc

SEQ ID NO: 4999 - DNA, 29 bp, Homo Sapiens
gcctctcgctcactcaccctgcaaaggac

SEQ ID NO: 5000 - DNA, 29 bp, Homo Sapiens
agcctctcgctcactcaccctgcaaagga

SEQ ID NO: 5001 - DNA, 29 bp, Homo Sapiens
cagcctctcgctcactcaccctgcaaagg

SEQ ID NO: 5002 - DNA, 29 bp, Homo Sapiens
gcagcctctcgctcactcaccctgcaaag

SEQ ID NO: 5003 - DNA, 29 bp, Homo Sapiens
agcagcctctcgctcactcaccctgcaaa

SEQ ID NO: 5004 - DNA, 29 bp, Homo Sapiens
aagcagcctctcgctcactcaccctgcaa

SEQ ID NO: 5005 - DNA, 29 bp, Homo Sapiens
aaagcagcctctcgctcactcaccctgca

SEQ ID NO: 5006 - DNA, 29 bp, Homo Sapiens
caaagcagcctctcgctcactcaccctgc

SEQ ID NO: 5007 - DNA, 29 bp, Homo Sapiens
ccaaagcagcctctcgctcactcaccctg

SEQ ID NO: 5008 - DNA, 29 bp, Homo Sapiens
tccaaagcagcctctcgctcactcaccct

SEQ ID NO: 5009 - DNA, 29 bp, Homo Sapiens
ttccaaagcagcctctcgctcactcaccc

SEQ ID NO: 5010 - DNA, 29 bp, Homo Sapiens
cttccaaagcagcctctcgctcactcacc

SEQ ID NO: 5011 - DNA, 29 bp, Homo Sapiens
tcttccaaagcagcctctcgctcactcac

SEQ ID NO: 5012 - DNA, 29 bp, Homo Sapiens
ttcttccaaagcagcctctcgctcactca

SEQ ID NO: 5013 - DNA, 29 bp, Homo Sapiens
tttcttccaaagcagcctctcgctcactc

SEQ ID NO: 5014 - DNA, 29 bp, Homo Sapiens
gtttcttccaaagcagcctctcgctcact

SEQ ID NO: 5015 - DNA, 29 bp, Homo Sapiens
agtttcttccaaagcagcctctcgctcac

SEQ ID NO: 5016 - DNA, 29 bp, Homo Sapiens
gagtttcttccaaagcagcctctcgctca

SEQ ID NO: 5017 - DNA, 29 bp, Homo Sapiens
tgagtttcttccaaagcagcctctcgctc

SEQ ID NO: 5018 - DNA, 29 bp, Homo Sapiens
atgagtttcttccaaagcagcctctcgct

SEQ ID NO: 5019 - DNA, 29 bp, Homo Sapiens
tatgagtttcttccaaagcagcctctcgc

SEQ ID NO: 5020 - DNA, 29 bp, Homo Sapiens
ctatgagtttcttccaaagcagcctctcg

SEQ ID NO: 5021 - DNA, 29 bp, Homo Sapiens
tctatgagtttcttccaaagcagcctctc

SEQ ID NO: 5022 - DNA, 29 bp, Homo Sapiens
atctatgagtttcttccaaagcagcctct

SEQ ID NO: 5023 - DNA, 29 bp, Homo Sapiens
aatctatgagtttcttccaaagcagcctc

SEQ ID NO: 5024 - DNA, 29 bp, Homo Sapiens
taatctatgagtttcttccaaagcagcct

SEQ ID NO: 5025 - DNA, 29 bp, Homo Sapiens
gtaatctatgagtttcttccaaagcagcc

SEQ ID NO: 5026 - DNA, 29 bp, Homo Sapiens
agtaatctatgagtttcttccaaagcagc

SEQ ID NO: 5027 - DNA, 29 bp, Homo Sapiens
cagtaatctatgagtttcttccaaagcag

SEQ ID NO: 5028 - DNA, 29 bp, Homo Sapiens
gcagtaatctatgagtttcttccaaagca

SEQ ID NO: 5029 - DNA, 29 bp, Homo Sapiens
tgcagtaatctatgagtttcttccaaagc

SEQ ID NO: 5030 - DNA, 29 bp, Homo Sapiens
ttgcagtaatctatgagtttcttccaaag

SEQ ID NO: 5031 - DNA, 29 bp, Homo Sapiens
gttgcagtaatctatgagtttcttccaaa

SEQ ID NO: 5032 - DNA, 29 bp, Homo Sapiens
tgttgcagtaatctatgagtttcttccaa

SEQ ID NO: 5033 - DNA, 29 bp, Homo Sapiens
ctgttgcagtaatctatgagtttcttcca

SEQ ID NO: 5034 - DNA, 30 bp, Homo Sapiens
caaaggaccaaatgttcagatgcaattatt

SEQ ID NO: 5035 - DNA, 30 bp, Homo Sapiens
gcaaaggaccaaatgttcagatgcaattat

SEQ ID NO: 5036 - DNA, 30 bp, Homo Sapiens
tgcaaaggaccaaatgttcagatgcaatta

SEQ ID NO: 5037 - DNA, 30 bp, Homo Sapiens
ctgcaaaggaccaaatgttcagatgcaatt

SEQ ID NO: 5038 - DNA, 30 bp, Homo Sapiens
cctgcaaaggaccaaatgttcagatgcaat

SEQ ID NO: 5039 - DNA, 30 bp, Homo Sapiens
ccctgcaaaggaccaaatgttcagatgcaa

SEQ ID NO: 5040 - DNA, 30 bp, Homo Sapiens
accctgcaaaggaccaaatgttcagatgca

SEQ ID NO: 5041 - DNA, 30 bp, Homo Sapiens
caccctgcaaaggaccaaatgttcagatgc

SEQ ID NO: 5042 - DNA, 30 bp, Homo Sapiens
tcaccctgcaaaggaccaaatgttcagatg

SEQ ID NO: 5043 - DNA, 30 bp, Homo Sapiens
ctcaccctgcaaaggaccaaatgttcagat

SEQ ID NO: 5044 - DNA, 30 bp, Homo Sapiens
actcaccctgcaaaggaccaaatgttcaga

SEQ ID NO: 5045 - DNA, 30 bp, Homo Sapiens
cactcaccctgcaaaggaccaaatgttcag

SEQ ID NO: 5046 - DNA, 30 bp, Homo Sapiens
tcactcaccctgcaaaggaccaaatgttca

SEQ ID NO: 5047 - DNA, 30 bp, Homo Sapiens
ctcactcaccctgcaaaggaccaaatgttc

SEQ ID NO: 5048 - DNA, 30 bp, Homo Sapiens
gctcactcaccctgcaaaggaccaaatgtt

SEQ ID NO: 5049 - DNA, 30 bp, Homo Sapiens
cgctcactcaccctgcaaaggaccaaatgt

SEQ ID NO: 5050 - DNA, 30 bp, Homo Sapiens
tcgctcactcaccctgcaaaggaccaaatg

SEQ ID NO: 5051 - DNA, 30 bp, Homo Sapiens
ctcgctcactcaccctgcaaaggaccaaat

SEQ ID NO: 5052 - DNA, 30 bp, Homo Sapiens
tctcgctcactcaccctgcaaaggaccaaa

SEQ ID NO: 5053 - DNA, 30 bp, Homo Sapiens
ctctcgctcactcaccctgcaaaggaccaa

SEQ ID NO: 5054 - DNA, 30 bp, Homo Sapiens
cctctcgctcactcaccctgcaaaggacca

SEQ ID NO: 5055 - DNA, 30 bp, Homo Sapiens
gcctctcgctcactcaccctgcaaaggacc

SEQ ID NO: 5056 - DNA, 30 bp, Homo Sapiens
agcctctcgctcactcaccctgcaaaggac

SEQ ID NO: 5057 - DNA, 30 bp, Homo Sapiens
cagcctctcgctcactcaccctgcaaagga

SEQ ID NO: 5058 - DNA, 30 bp, Homo Sapiens
gcagcctctcgctcactcaccctgcaaagg

SEQ ID NO: 5059 - DNA, 30 bp, Homo Sapiens
agcagcctctcgctcactcaccctgcaaag

SEQ ID NO: 5060 - DNA, 30 bp, Homo Sapiens
aagcagcctctcgctcactcaccctgcaaa

SEQ ID NO: 5061 - DNA, 30 bp, Homo Sapiens
aaagcagcctctcgctcactcaccctgcaa

SEQ ID NO: 5062 - DNA, 30 bp, Homo Sapiens
caaagcagcctctcgctcactcaccctgca

SEQ ID NO: 5063 - DNA, 30 bp, Homo Sapiens
ccaaagcagcctctcgctcactcaccctgc

SEQ ID NO: 5064 - DNA, 30 bp, Homo Sapiens
tccaaagcagcctctcgctcactcaccctg

SEQ ID NO: 5065 - DNA, 30 bp, Homo Sapiens
ttccaaagcagcctctcgctcactcaccct

SEQ ID NO: 5066 - DNA, 30 bp, Homo Sapiens
cttccaaagcagcctctcgctcactcaccc

SEQ ID NO: 5067 - DNA, 30 bp, Homo Sapiens
tcttccaaagcagcctctcgctcactcacc

SEQ ID NO: 5068 - DNA, 30 bp, Homo Sapiens
ttcttccaaagcagcctctcgctcactcac

SEQ ID NO: 5069 - DNA, 30 bp, Homo Sapiens
tttcttccaaagcagcctctcgctcactca

SEQ ID NO: 5070 - DNA, 30 bp, Homo Sapiens
gtttcttccaaagcagcctctcgctcactc

SEQ ID NO: 5071 - DNA, 30 bp, Homo Sapiens
agtttcttccaaagcagcctctcgctcact

SEQ ID NO: 5072 - DNA, 30 bp, Homo Sapiens
gagtttcttccaaagcagcctctcgctcac

SEQ ID NO: 5073 - DNA, 30 bp, Homo Sapiens
tgagtttcttccaaagcagcctctcgctca

SEQ ID NO: 5074 - DNA, 30 bp, Homo Sapiens
atgagtttcttccaaagcagcctctcgctc

SEQ ID NO: 5075 - DNA, 30 bp, Homo Sapiens
tatgagtttcttccaaagcagcctctcgct

SEQ ID NO: 5076 - DNA, 30 bp, Homo Sapiens
ctatgagtttcttccaaagcagcctctcgc

SEQ ID NO: 5077 - DNA, 30 bp, Homo Sapiens
tctatgagtttcttccaaagcagcctctcg

SEQ ID NO: 5078 - DNA, 30 bp, Homo Sapiens
atctatgagtttcttccaaagcagcctctc

SEQ ID NO: 5079 - DNA, 30 bp, Homo Sapiens
aatctatgagtttcttccaaagcagcctct

SEQ ID NO: 5080 - DNA, 30 bp, Homo Sapiens
taatctatgagtttcttccaaagcagcctc

SEQ ID NO: 5081 - DNA, 30 bp, Homo Sapiens
gtaatctatgagtttcttccaaagcagcct

SEQ ID NO: 5082 - DNA, 30 bp, Homo Sapiens
agtaatctatgagtttcttccaaagcagcc

SEQ ID NO: 5083 - DNA, 30 bp, Homo Sapiens
cagtaatctatgagtttcttccaaagcagc

SEQ ID NO: 5084 - DNA, 30 bp, Homo Sapiens
gcagtaatctatgagtttcttccaaagcag

SEQ ID NO: 5085 - DNA, 30 bp, Homo Sapiens
tgcagtaatctatgagtttcttccaaagca

SEQ ID NO: 5086 - DNA, 30 bp, Homo Sapiens
ttgcagtaatctatgagtttcttccaaagc

SEQ ID NO: 5087 - DNA, 30 bp, Homo Sapiens
gttgcagtaatctatgagtttcttccaaag

SEQ ID NO: 5088 - DNA, 30 bp, Homo Sapiens
tgttgcagtaatctatgagtttcttccaaa

SEQ ID NO: 5089 - DNA, 30 bp, Homo Sapiens
ctgttgcagtaatctatgagtttcttccaa

SEQ ID NO: 5090 - DNA, 30 bp, Homo Sapiens
actgttgcagtaatctatgagtttcttcca

SEQ ID NO: 5091 - DNA, 669 bp, Homo Sapiens
tcttgatgggatgctcctgaaagcaattaattctcagttttttgtggcttctaatgcaaaatacattgacgcagacagaatttgaaatgaattttcttctaatatagcaattaattttatttaaatatctctagagtttttttttaatactgtgactaacctatgtttgttctttttcacctctcgtatccacgatcactaagaaacccaaatactttgttcatgtttaaattttacaacatttcatagactattaaacatggaacatccttgtggggacaagaaatcgaatttgctcttgaaaaggtttccaactaattgatttgtaggacattataacatcctctagctgacaagcttacaaaaataaaaactggagctaaccgagagggtgcttttttccctgacacataaaaggtgtctttctgtcttgtatcctttggatatgggcatgtcagtttcatagggaaattttcacatggagcttttgtatttctttctttgccagtacaactgcatgtggtagcacactgtttaatcttttctcaaataaaaagacatggggcttcatttttgttttgcctttttggtatcttacaggaactccaggatggcattgggcagcggcaaactgttgtcagaacattgaatgcaactggggaagaaata

SEQ ID NO: 5092 - DNA, 423 bp, Homo Sapiens
cagctgtcagacagaaaaaagaggtagggcgacagatctaataggaatgaaaacattttagcagactttttaagctttctttagaagaatatttcatgagagattataagcagggtgaaaggcactaacattaaagaacctatcaaccattaatcaacagcagtaaagaaattttttatttctttttttcatatactaaaatatatacttgtggctagttagtggttttctgctattttaaacttgaagtttgctttaaaaatcacccatgattgcttaaaggtgaatatcttcaatatattttaacttcaacaagctgaatctcagttgtttttcaagaagattttagaaagcaattataaatgattgttttgtaggaaagacagatctttgcttagttttaaaaatagctatgaatatgac

SEQ ID NO: 5093 - DNA, 453 bp, Homo Sapiens
tctcaaatttggcagtatattaaaaataagctttcaaaattgaccaacaaaaactacaaaattgaaaaaaaggtactttgaactttcacatgttcaaatatatgtatatatatttcacatatatatatgaaacctcctctgtggagaggggtttatagaaatctgtaattgtcattcttgcatgccttcccccatacaaacgcctttaagttaaataaaaatgaaagtaaatagactgcacaatattatagttgttgcttaaaggaagagctgtagcaacaactcaccccattgttggtatattacaatttagttcctccatctttctctttttatggagttcactaggtgcaccattctgatatttaataattgcatctgaacatttggtcctttgcagggtgagtgagcgagaggctgctttggaagaaactcatagattactgcaacagt

SEQ ID NO: 5094 - DNA, 24 bp, Homo Sapiens
gcacactgtttaatcttttctcaa

SEQ ID NO: 5095 - DNA, 80 bp, Homo Sapiens
gtatcttacaggaactccaggatggcattgggcagcggcaaactgttgtcagaacattgaatgcaactggggaagaaata

SEQ ID NO: 5096 - DNA, 96 bp, Homo Sapiens
cagctgtcagacagaaaaaagaggtagggcgacagatctaataggaatgaaaacattttagcagactttttaagctttctttagaagaatatttca

SEQ ID NO: 5097 - DNA, 86 bp, Homo Sapiens
aataattgcatctgaacatttggtcctttgcagggtgagtgagcgagaggctgctttggaagaaactcatagattactgcaacagt

SEQ ID NO: 5098 - DNA, 28 bp, Artificial
  Synthetic
tgacaacagcttgacgctgcccgtttaa

SEQ ID NO: 5099 - DNA, 28 bp, Artificial
  Synthetic
aaagcagcctcttgctcacttactctgc

SEQ ID NO: 5100 - DNA, 24 bp, Artificial
  Synthetic
agctctgctaaaaagtctctgtca

SEQ ID NO: 5101 - DNA, 24 bp, Artificial
  Synthetic
ttaaaggatagtgtagctctgcta

SEQ ID NO: 5102 - DNA, 24 bp, Artificial
  Synthetic
gatagtgtagctctgctaaaaagt

SEQ ID NO: 5103 - DNA, 20 bp, Artificial
  Synthetic
cagttgaaaaatggcgacac

SEQ ID NO: 5104 - DNA, 20 bp, Artificial
  Synthetic
ttagctgctgctcatctcca

SEQ ID NO: 5105 - DNA, 20 bp, Artificial
  Synthetic
ttagctgctgctcatctcca

SEQ ID NO: 5106 - DNA, 20 bp, Artificial
  Synthetic
gttgagaaatggcggcgttt

SEQ ID NO: 5107 - DNA, 20 bp, Artificial
  Synthetic
atgacatacgcccaaaggtg

SEQ ID NO: 5108 - DNA, 23 bp, Artificial
  Synthetic
tgttgagagactttttccgaagt

SEQ ID NO: 5109 - DNA, 20 bp, Artificial
  Synthetic
attcaccccctgctgaattt

SEQ ID NO: 5110 - DNA, 25 bp, Artificial
  Synthetic
atttgacagatctgttgagaaatgg

SEQ ID NO: 5111 - DNA, 21 bp, Artificial
  Synthetic
agttgctgctcttttccaggt

SEQ ID NO: 5112 - DNA, 20 bp, Artificial
  Synthetic
gagaaatggcggcgttttca

SEQ ID NO: 5113 - DNA, 20 bp, Artificial
  Synthetic
gggacgcctctgttccaaat

1. A combination of antisense oligomers or pharmaceutically acceptable salts thereof, or hydrates thereof which cause simultaneous skipping of any two or more numerically consecutive exons selected from the group consisting of the 45th exon to the 55th exon in human dystrophin pre-mRNA,
the combination comprising:
(i) a first antisense oligomer or a pharmaceutically acceptable salt thereof, or a hydrate thereof, comprising:
a first unit oligomer comprising a base sequence complementary to a base sequence consisting of a base sequence of 11 bases in the upstream direction from the 3′ end of the 44th intron and a base sequence of 69 bases in the downstream direction from the 5′ end of the 45th exon in the human dystrophin pre-mRNA, or a partial base sequence thereof; and
a second unit oligomer comprising a base sequence complementary to a base sequence of from the 52nd to 75th bases in the upstream direction from the 3′ end of the 44th intron in the human dystrophin pre-mRNA, or a partial base sequence thereof; and
(ii) a second antisense oligomer or a pharmaceutically acceptable salt thereof, or a hydrate thereof, comprising a base sequence complementary to a base sequence consisting of a base sequence of 33 bases in the upstream direction from the 3′ end of the 54th intron and a base sequence of 53 bases in the downstream direction from the 5′ end of the 55th exon in the human dystrophin pre-mRNA, or a partial base sequence thereof.

2. The combination according to claim 1, wherein
the first unit oligomer comprises a base sequence complementary to consecutive 15 to 30 bases of a base sequence consisting of a base sequence of 11 bases in the upstream direction from the 3′ end of the 44th intron and a base sequence of 69 bases in the downstream direction from the 5′ end of the 45th exon in the human dystrophin pre-mRNA,
the second unit oligomer comprises a base sequence complementary to consecutive 1 to 10 bases of a base sequence of from the 52nd to 75th bases in the upstream direction from the 3′ end of the 44th intron in the human dystrophin pre-mRNA, and
the second antisense oligomer comprises a base sequence complementary to consecutive 15 to 30 bases of a base sequence consisting of a base sequence of 33 bases in the upstream direction from the 3′ end of the 54th intron and a base sequence of 53 bases in the downstream direction from the 5′ end of the 55th exon in the human dystrophin pre-mRNA.

3. The combination according to claim 1, wherein
the first unit oligomer comprises a base sequence complementary to:
(a) any one base sequence selected from the group consisting of SEQ ID NOs: 211 to 906;
(b) a base sequence that hybridizes under stringent conditions to a base sequence complementary to any one base sequence selected from the group consisting of SEQ ID NOs: 211 to 906;
(c) a base sequence that has at least 85% identity with any one base sequence selected from the group consisting of SEQ ID NOs: 211 to 906, and has a length within ±15% of the length of the any one base sequence selected; or
(d) a partial base sequence of any one base sequence selected from the group consisting of the base sequences (a), (b), and (c), and/or
the second unit oligomer comprises a base sequence complementary to:
(a) any one base sequence selected from the group consisting of SEQ ID NOs: 1 to 105;
(b) a base sequence that hybridizes under stringent conditions to a base sequence complementary to any one base sequence selected from the group consisting of SEQ ID NOs: 1 to 105;
(c) a base sequence that has at least 85% identity with any one base sequence selected from the group consisting of SEQ ID NOs: 1 to 105, and has a length within ±15% of the length of the any one base sequence selected; or
(d) a partial base sequence of any one base sequence selected from the group consisting of the base sequences (a), (b), and (c).

4. The combination according to claim 1, wherein
the second antisense oligomer comprises a base sequence complementary to:
(a) any one base sequence selected from the group consisting of SEQ ID NOs: 3507 to 4298;
(b) a base sequence that hybridizes under stringent conditions to a base sequence complementary to any one base sequence selected from the group consisting of SEQ ID NOS: 3507 to 4298;
(c) a base sequence that has at least 85% identity with any one base sequence selected from the group consisting of SEQ ID NOs: 3507 to 4298, and has a length within ±15% of the length of the any one base sequence selected; or
(d) a partial base sequence of any one base sequence selected from the group consisting of the base sequences (a), (b), and (c).

5. The combination according to claim 1, wherein the first antisense oligomer comprises the first unit oligomer and the second unit oligomer from the 5′ ends in this order, the first unit oligomer comprises any one base sequence selected from SEQ ID NOs: 907 to 1602, the second unit oligomer comprises any one base sequence selected from SEQ ID NOs: 106 to 210, and the second antisense oligomer comprises any one base sequence selected from SEQ ID NOs: 4299 to 5090.

6. The combination according to claim 1, wherein the first unit oligomer comprises any one base sequence selected from the group consisting of SEQ ID NOs: 1180, 1190, 1201, 1212, 1222, 1224, and 1239.

7. The combination according to claim 1, wherein the second unit oligomer comprises any one base sequence selected from the group consisting of SEQ ID NOs: 114, 124, 151, 201, 203, and 205.

8. The combination according to claim 6, wherein
the first antisense oligomer comprises the first unit oligomer and the second unit oligomer from the 5′ ends in this order, and
the first unit oligomer comprises a base sequence of SEQ ID NO: 1201, and the second unit oligomer comprises a base sequence of SEQ ID NO: 151,
the first unit oligomer comprises a base sequence of SEQ ID NO: 1201, and the second unit oligomer comprises a base sequence of SEQ ID NO: 201,
the first unit oligomer comprises a base sequence of SEQ ID NO: 1201, and the second unit oligomer comprises a base sequence of SEQ ID NO: 203,
the first unit oligomer comprises a base sequence of SEQ ID NO: 1201, and the second unit oligomer comprises a base sequence of SEQ ID NO: 205,
the first unit oligomer comprises a base sequence of SEQ ID NO: 1239, and the second unit oligomer comprises a base sequence of SEQ ID NO: 114,
the first unit oligomer comprises a base sequence of SEQ ID NO: 1224, and the second unit oligomer comprises a base sequence of SEQ ID NO: 124,
the first unit oligomer comprises a base sequence of SEQ ID NO: 1180, and the second unit oligomer comprises a base sequence of SEQ ID NO: 151,
the first unit oligomer comprises a base sequence of SEQ ID NO: 1190, and the second unit oligomer comprises a base sequence of SEQ ID NO: 151,
the first unit oligomer comprises a base sequence of SEQ ID NO: 1212, and the second unit oligomer comprises a base sequence of SEQ ID NO: 151, or
the first unit oligomer comprises a base sequence of SEQ ID NO: 1222, and the second unit oligomer comprises a base sequence of SEQ ID NO: 151.

9. The combination according to claim 1, wherein the second antisense oligomer comprises a base sequence selected from the group consisting of SEQ ID NOs: 4698, 4702, 4752, 4923, 4926, 4936, 4950, and 4977.

10. The combination according to claim 1, wherein
the first antisense oligomer comprises the first unit oligomer and the second unit oligomer from the 5′ ends in this order, and
the first unit oligomer comprises a base sequence of SEQ ID NO: 1201, the second unit oligomer comprises a base sequence of SEQ ID NO: 151, and the second antisense oligomer comprises a base sequence of SEQ ID NO: 4950,
the first unit oligomer comprises a base sequence of SEQ ID NO: 1201, the second unit oligomer comprises a base sequence of SEQ ID NO: 201, and the second antisense oligomer comprises a base sequence of SEQ ID NO: 4950,
the first unit oligomer comprises a base sequence of SEQ ID NO: 1201, the second unit oligomer comprises a base sequence of SEQ ID NO: 203, and the second antisense oligomer comprises a base sequence of SEQ ID NO: 4950,
the first unit oligomer comprises a base sequence of SEQ ID NO: 1201, the second unit oligomer comprises a base sequence of SEQ ID NO: 205, and the second antisense oligomer comprises a base sequence of SEQ ID NO: 4950,
the first unit oligomer comprises a base sequence of SEQ ID NO: 1239, the second unit oligomer comprises a base sequence of SEQ ID NO: 114, and the second antisense oligomer comprises a base sequence of SEQ ID NO: 4950,
the first unit oligomer comprises a base sequence of SEQ ID NO: 1224, the second unit oligomer comprises a base sequence of SEQ ID NO: 124, and the second antisense oligomer comprises a base sequence of SEQ ID NO: 4950,
the first unit oligomer comprises a base sequence of SEQ ID NO: 1180, the second unit oligomer comprises a base sequence of SEQ ID NO: 151, and the second antisense oligomer comprises a base sequence of SEQ ID NO: 4950,
the first unit oligomer comprises a base sequence of SEQ ID NO: 1190, the second unit oligomer comprises a base sequence of SEQ ID NO: 151, and the second antisense oligomer comprises a base sequence of SEQ ID NO: 4950,
the first unit oligomer comprises a base sequence of SEQ ID NO: 1212, the second unit oligomer comprises a base sequence of SEQ ID NO: 151, and the second antisense oligomer comprises a base sequence of SEQ ID NO: 4950,
the first unit oligomer comprises a base sequence of SEQ ID NO: 1222, the second unit oligomer comprises a base sequence of SEQ ID NO: 151, and the second antisense oligomer comprises a base sequence of SEQ ID NO: 4950,
the first unit oligomer comprises a base sequence of SEQ ID NO: 1201, the second unit oligomer comprises a base sequence of SEQ ID NO: 151, and the second antisense oligomer comprises a base sequence of SEQ ID NO: 4698,
the first unit oligomer comprises a base sequence of SEQ ID NO: 1201, the second unit oligomer comprises a base sequence of SEQ ID NO: 151, and the second antisense oligomer comprises a base sequence of SEQ ID NO: 4702,
the first unit oligomer comprises a base sequence of SEQ ID NO: 1201, the second unit oligomer comprises a base sequence of SEQ ID NO: 151, and the second antisense oligomer comprises a base sequence of SEQ ID NO: 4752,
the first unit oligomer comprises a base sequence of SEQ ID NO: 1201, the second unit oligomer comprises a base sequence of SEQ ID NO: 151, and the second antisense oligomer comprises a base sequence of SEQ ID NO: 4923,
the first unit oligomer comprises a base sequence of SEQ ID NO: 1201, the second unit oligomer comprises a base sequence of SEQ ID NO: 151, and the second antisense oligomer comprises a base sequence of SEQ ID NO: 4926,
the first unit oligomer comprises a base sequence of SEQ ID NO: 1201, the second unit oligomer comprises a base sequence of SEQ ID NO: 151, and the second antisense oligomer comprises a base sequence of SEQ ID NO: 4936,
the first unit oligomer comprises a base sequence of SEQ ID NO: 1201, the second unit oligomer comprises a base sequence of SEQ ID NO: 151, and the second antisense oligomer comprises a base sequence of SEQ ID NO: 4977, or
the first unit oligomer comprises a base sequence of SEQ ID NO: 1180, the second unit oligomer comprises a base sequence of SEQ ID NO: 151, and the second antisense oligomer comprises a base sequence of SEQ ID NO: 4977.

11. The combination according to claim 5, wherein the first unit oligomer comprises a base sequence of SEQ ID NO: 1201, the second unit oligomer comprises a base sequence of SEQ ID NO: 151, and the second antisense oligomer comprises a base sequence of SEQ ID NO: 4950.

12. The combination according to claim 1, further comprising:
(iii) a third antisense oligomer or a pharmaceutically acceptable salt thereof, or a hydrate thereof, comprising a base sequence complementary to a base sequence consisting of a base sequence of 23 bases in the upstream direction from the 3′ end of the 45th exon and a base sequence of 73 bases in the downstream direction from the 5′ end of the 45th intron in the human dystrophin pre-mRNA, or a partial base sequence thereof.

13. The combination according to claim 12, wherein the third antisense oligomer comprises a base sequence complementary to consecutive 15 to 30 bases of a base sequence consisting of a base sequence of 23 bases in the upstream direction from the 3′ end of the 45th exon and a base sequence of 73 bases in the downstream direction from the 5′ end of the 45th intron in the human dystrophin pre-mRNA.

14. The combination according to claim 12, wherein
the third antisense oligomer comprises a base sequence complementary to:
(a) any one base sequence selected from the group consisting of SEQ ID NOs: 1603 to 2554;
(b) a base sequence that hybridizes under stringent conditions to a base sequence complementary to any one base sequence selected from the group consisting of SEQ ID NOs: 1603 to 2554;
(c) a base sequence that has at least 85% identity with any one base sequence selected from the group consisting of SEQ ID NOs: 1603 to 2554, and has a length within ±15% of the length of the any one base sequence selected; or
(d) a partial base sequence of any one base sequence selected from the group consisting of the base sequences (a), (b), and (c).

15. The combination according to claim 14, wherein the third antisense oligomer comprises a base sequence complementary to:
(a) any one base sequence selected from the group consisting of SEQ ID NOs: 1611 to 1654, 1664 to 1707, 1718 to 1761, 1773 to 1816, 1829 to 1872, 1886 to 1929, 1944 to 1987, 2003 to 2046, 2063 to 2106, 2124 to 2167, 2186 to 2229, 2249 to 2292, 2313 to 2356, 2378 to 2421, 2444 to 2487, and 2511 to 2554;
(b) a base sequence that hybridizes under stringent conditions to a base sequence complementary to any one base sequence selected from the group consisting of SEQ ID NOs: 1611 to 1654, 1664 to 1707, 1718 to 1761, 1773 to 1816, 1829 to 1872, 1886 to 1929, 1944 to 1987, 2003 to 2046, 2063 to 2106, 2124 to 2167, 2186 to 2229, 2249 to 2292, 2313 to 2356, 2378 to 2421, 2444 to 2487, and 2511 to 2554;
(c) a base sequence that has at least 85% identity with any one base sequence selected from the group consisting of SEQ ID NOs: 1611 to 1654, 1664 to 1707, 1718 to 1761, 1773 to 1816, 1829 to 1872, 1886 to 1929, 1944 to 1987, 2003 to 2046, 2063 to 2106, 2124 to 2167, 2186 to 2229, 2249 to 2292, 2313 to 2356, 2378 to 2421, 2444 to 2487, and 2511 to 2554, and has a length within ±15% of the length of the any one base sequence selected; or
(d) a partial base sequence of any one base sequence selected from the group consisting of the base sequences (a), (b), and (c).

16. The combination according to claim 15, wherein the third antisense oligomer comprises a base sequence complementary to:
(a) any one base sequence selected from the group consisting of SEQ ID NOs: 1617 to 1654, 1670 to 1707, 1724 to 1761, 1779 to 1816, 1835 to 1872, 1892 to 1929, 1950 to 1987, 2009 to 2046, 2069 to 2106, 2130 to 2167, 2192 to 2229, 2255 to 2292, 2319 to 2356, 2384 to 2421, 2450 to 2487, and 2517 to 2554;
(b) a base sequence that hybridizes under stringent conditions to a base sequence complementary to any one base sequence selected from the group consisting of SEQ ID NOS: 1617 to 1654, 1670 to 1707, 1724 to 1761, 1779 to 1816, 1835 to 1872, 1892 to 1929, 1950 to 1987, 2009 to 2046, 2069 to 2106, 2130 to 2167, 2192 to 2229, 2255 to 2292, 2319 to 2356, 2384 to 2421, 2450 to 2487, and 2517 to 2554;
(c) a base sequence that has at least 85% identity with any one base sequence selected from the group consisting of SEQ ID NOs: 1617 to 1654, 1670 to 1707, 1724 to 1761, 1779 to 1816, 1835 to 1872, 1892 to 1929, 1950 to 1987, 2009 to 2046, 2069 to 2106, 2130 to 2167, 2192 to 2229, 2255 to 2292, 2319 to 2356, 2384 to 2421, 2450 to 2487, and 2517 to 2554, and has a length within ±15% of the length of the any one base sequence selected; or
(d) a partial base sequence of any one base sequence selected from the group consisting of the base sequences (a), (b), and (c).

17. The combination according to claim 12, wherein the third antisense oligomer comprises a base sequence selected from the group consisting of SEQ ID NOs: 3060, 3065, 3077, 3082, 3087, 3090, 3096, 3108, 3119, and 3320.

18. The combination according to claim 12, wherein the first antisense oligomer comprises the first unit oligomer and the second unit oligomer from the 5′ ends in this order, the first unit oligomer comprises any one base sequence selected from SEQ ID NOs: 907 to 1602, the second unit oligomer comprises any one base sequence selected from SEQ ID NOs: 106 to 210, the second antisense oligomer comprises any one base sequence selected from SEQ ID NOs: 4299 to 5090, and the third antisense oligomer comprises any one base sequence selected from SEQ ID NOs: 2555 to 3506.

19. The combination according to claim 12, wherein
the first antisense oligomer comprises the first unit oligomer and the second unit oligomer from the 5′ ends in this order, and
the first unit oligomer comprises a base sequence of SEQ ID NO: 1201, the second unit oligomer comprises a base sequence of SEQ ID NO: 151, the second antisense oligomer comprises a base sequence of SEQ ID NO: 4950, and the third antisense oligomer comprises a base sequence of SEQ ID NO: 3082,
the first unit oligomer comprises a base sequence of SEQ ID NO: 1201, the second unit oligomer comprises a base sequence of SEQ ID NO: 201, the second antisense oligomer comprises a base sequence of SEQ ID NO: 4950, and the third antisense oligomer comprises a base sequence of SEQ ID NO: 3082,
the first unit oligomer comprises a base sequence of SEQ ID NO: 1201, the second unit oligomer comprises a base sequence of SEQ ID NO: 203, the second antisense oligomer comprises a base sequence of SEQ ID NO: 4950, and the third antisense oligomer comprises a base sequence of SEQ ID NO: 3082,
the first unit oligomer comprises a base sequence of SEQ ID NO: 1201, the second unit oligomer comprises a base sequence of SEQ ID NO: 205, the second antisense oligomer comprises a base sequence of SEQ ID NO: 4950, and the third antisense oligomer comprises a base sequence of SEQ ID NO: 3082,
the first unit oligomer comprises a base sequence of SEQ ID NO: 1239, the second unit oligomer comprises a base sequence of SEQ ID NO: 114, the second antisense oligomer comprises a base sequence of SEQ ID NO: 4950, and the third antisense oligomer comprises a base sequence of SEQ ID NO: 3082,
the first unit oligomer comprises a base sequence of SEQ ID NO: 1224, the second unit oligomer comprises a base sequence of SEQ ID NO: 124, the second antisense oligomer comprises a base sequence of SEQ ID NO: 4950, and the third antisense oligomer comprises a base sequence of SEQ ID NO: 3082,
the first unit oligomer comprises a base sequence of SEQ ID NO: 1180, the second unit oligomer comprises a base sequence of SEQ ID NO: 151, the second antisense oligomer comprises a base sequence of SEQ ID NO: 4950, and the third antisense oligomer comprises a base sequence of SEQ ID NO: 3082,
the first unit oligomer comprises a base sequence of SEQ ID NO: 1190, the second unit oligomer comprises a base sequence of SEQ ID NO: 151, the second antisense oligomer comprises a base sequence of SEQ ID NO: 4950, and the third antisense oligomer comprises a base sequence of SEQ ID NO: 3082,
the first unit oligomer comprises a base sequence of SEQ ID NO: 1212, the second unit oligomer comprises a base sequence of SEQ ID NO: 151, the second antisense oligomer comprises a base sequence of SEQ ID NO: 4950, and the third antisense oligomer comprises a base sequence of SEQ ID NO: 3082,
the first unit oligomer comprises a base sequence of SEQ ID NO: 1222, the second unit oligomer comprises a base sequence of SEQ ID NO: 151, the second antisense oligomer comprises a base sequence of SEQ ID NO: 4950, and the third antisense oligomer comprises a base sequence of SEQ ID NO: 3082,
the first unit oligomer comprises a base sequence of SEQ ID NO: 1201, the second unit oligomer comprises a base sequence of SEQ ID NO: 151, the second antisense oligomer comprises a base sequence of SEQ ID NO: 4950, and the third antisense oligomer comprises a base sequence of SEQ ID NO: 3060,
the first unit oligomer comprises a base sequence of SEQ ID NO: 1201, the second unit oligomer comprises a base sequence of SEQ ID NO: 151, the second antisense oligomer comprises a base sequence of SEQ ID NO: 4950, and the third antisense oligomer comprises a base sequence of SEQ ID NO: 3065,
the first unit oligomer comprises a base sequence of SEQ ID NO: 1201, the second unit oligomer comprises a base sequence of SEQ ID NO: 151, the second antisense oligomer comprises a base sequence of SEQ ID NO: 4950, and the third antisense oligomer comprises a base sequence of SEQ ID NO: 3077,
the first unit oligomer comprises a base sequence of SEQ ID NO: 1201, the second unit oligomer comprises a base sequence of SEQ ID NO: 151, the second antisense oligomer comprises a base sequence of SEQ ID NO: 4950, and the third antisense oligomer comprises a base sequence of SEQ ID NO: 3087,
the first unit oligomer comprises a base sequence of SEQ ID NO: 1201, the second unit oligomer comprises a base sequence of SEQ ID NO: 151, the second antisense oligomer comprises a base sequence of SEQ ID NO: 4950, and the third antisense oligomer comprises a base sequence of SEQ ID NO: 3090,
the first unit oligomer comprises a base sequence of SEQ ID NO: 1201, the second unit oligomer comprises a base sequence of SEQ ID NO: 151, the second antisense oligomer comprises a base sequence of SEQ ID NO: 4950, and the third antisense oligomer comprises a base sequence of SEQ ID NO: 3096,
the first unit oligomer comprises a base sequence of SEQ ID NO: 1201, the second unit oligomer comprises a base sequence of SEQ ID NO: 151, the second antisense oligomer comprises a base sequence of SEQ ID NO: 4950, and the third antisense oligomer comprises a base sequence of SEQ ID NO: 3108,
the first unit oligomer comprises a base sequence of SEQ ID NO: 1201, the second unit oligomer comprises a base sequence of SEQ ID NO: 151, the second antisense oligomer comprises a base sequence of SEQ ID NO: 4950, and the third antisense oligomer comprises a base sequence of SEQ ID NO: 3119,
the first unit oligomer comprises a base sequence of SEQ ID NO: 1201, the second unit oligomer comprises a base sequence of SEQ ID NO: 151, the second antisense oligomer comprises a base sequence of SEQ ID NO: 4950, and the third antisense oligomer comprises a base sequence of SEQ ID NO: 3320,
the first unit oligomer comprises a base sequence of SEQ ID NO: 1201, the second unit oligomer comprises a base sequence of SEQ ID NO: 151, the second antisense oligomer comprises a base sequence of SEQ ID NO: 4698, and the third antisense oligomer comprises a base sequence of SEQ ID NO: 3082,
the first unit oligomer comprises a base sequence of SEQ ID NO: 1201, the second unit oligomer comprises a base sequence of SEQ ID NO: 151, the second antisense oligomer comprises a base sequence of SEQ ID NO: 4702, and the third antisense oligomer comprises a base sequence of SEQ ID NO: 3082,
the first unit oligomer comprises a base sequence of SEQ ID NO: 1201, the second unit oligomer comprises a base sequence of SEQ ID NO: 151, the second antisense oligomer comprises a base sequence of SEQ ID NO: 4752, and the third antisense oligomer comprises a base sequence of SEQ ID NO: 3082,
the first unit oligomer comprises a base sequence of SEQ ID NO: 1201, the second unit oligomer comprises a base sequence of SEQ ID NO: 151, the second antisense oligomer comprises a base sequence of SEQ ID NO: 4923, and the third antisense oligomer comprises a base sequence of SEQ ID NO: 3082,
the first unit oligomer comprises a base sequence of SEQ ID NO: 1201, the second unit oligomer comprises a base sequence of SEQ ID NO: 151, the second antisense oligomer comprises a base sequence of SEQ ID NO: 4926, and the third antisense oligomer comprises a base sequence of SEQ ID NO: 3082,
the first unit oligomer comprises a base sequence of SEQ ID NO: 1201, the second unit oligomer comprises a base sequence of SEQ ID NO: 151, the second antisense oligomer comprises a base sequence of SEQ ID NO: 4936, and the third antisense oligomer comprises a base sequence of SEQ ID NO: 3082,
the first unit oligomer comprises a base sequence of SEQ ID NO: 1201, the second unit oligomer comprises a base sequence of SEQ ID NO: 151, the second antisense oligomer comprises a base sequence of SEQ ID NO: 4977, and the third antisense oligomer comprises a base sequence of SEQ ID NO: 3082,
the first unit oligomer comprises a base sequence of SEQ ID NO: 1201, the second unit oligomer comprises a base sequence of SEQ ID NO: 151, the second antisense oligomer comprises a base sequence of SEQ ID NO: 4977, and the third antisense oligomer comprises a base sequence of SEQ ID NO: 3096, or
the first unit oligomer comprises a base sequence of SEQ ID NO: 1180, the second unit oligomer comprises a base sequence of SEQ ID NO: 151, the second antisense oligomer comprises a base sequence of SEQ ID NO: 4977, and the third antisense oligomer comprises a base sequence of SEQ ID NO: 3096.

20. The combination according to claim 18, wherein the first unit oligomer comprises a base sequence of SEQ ID NO: 1201, the second unit oligomer comprises a base sequence of SEQ ID NO: 151, the second antisense oligomer comprises a base sequence of SEQ ID NO: 4950, and the third antisense oligomer comprises a base sequence of SEQ ID NO: 3082, 3090, or 3096.

21. The combination according to claim 1, the combination causing skipping of all exons from the 45th exon to the 55th exon in the human dystrophin pre-mRNA.

22. The combination according to claim 1, wherein the first and second antisense oligomers are oligonucleotides.

23. The combination according to claim 22, wherein a sugar moiety and/or a phosphate-binding region of at least one base constituting the oligonucleotide is modified.

24. The combination according to claim 22, wherein the sugar moiety of at least one base constituting the oligonucleotide is a ribose in which a 2′-OH group is replaced by any one group selected from the group consisting of —OR, —R, —R′OR, —SH, —SR, —NH₂, —NHR, —NR₂, —N₃, —CN, —F, —Cl, —Br, and —I (wherein R is an alkyl or an aryl and R′ is an alkylene).

25. The combination according to claim 22, wherein the phosphate-binding region of at least one base constituting the oligonucleotide is any one selected from the group consisting of a phosphorothioate bond, a phosphorodithioate bond, an alkylphosphonate bond, a phosphoramidate bond, and a boranophosphate bond.

26. The combination according to claim 1, wherein the first and second antisense oligomers are morpholino oligomers.

27. The combination according to claim 12, wherein the first to third antisense oligomers are phosphorodiamidate morpholino oligomers.

28. The combination according to claim 12, wherein the 5′ end of each of the first to third antisense oligomers is a group represented by any one of the following chemical formulae (1) to (3):

[chemical structure]

29. (a) A pharmaceutical composition comprising the first and second antisense oligomers according to claim 1, or pharmaceutically acceptable salts thereof, or hydrates thereof, or
(b) a pharmaceutical combination comprising (i) a pharmaceutical composition comprising the first antisense oligomer according to claim 1, or a pharmaceutically acceptable salt thereof, or a hydrate thereof, and (ii) a pharmaceutical composition comprising the second antisense oligomer according to claim 1, or a pharmaceutically acceptable salt thereof, or a hydrate thereof.

30. (a) A pharmaceutical composition comprising the first to third antisense oligomers according to claim 12, or pharmaceutically acceptable salts thereof, or hydrates thereof, or
(b) a pharmaceutical combination comprising (i) a pharmaceutical composition comprising the first antisense oligomer according to claim 12, or a pharmaceutically acceptable salt thereof, or a hydrate thereof, (ii) a pharmaceutical composition comprising the second antisense oligomer according to claim 12, or a pharmaceutically acceptable salt thereof, or a hydrate thereof, and (iii) a pharmaceutical composition comprising the third antisense oligomer according to claim 12, or a pharmaceutically acceptable salt thereof, or a hydrate thereof.

31. The pharmaceutical composition or the pharmaceutical combination according to claim 29, wherein the pharmaceutical composition further comprises a pharmaceutically acceptable carrier.

32-33. (canceled)

34. A method for treatment of muscular dystrophy, comprising administering to a patient with muscular dystrophy the first and second antisense oligomers according to claim 1, or pharmaceutically acceptable salts thereof, or hydrates thereof.

35. The method for treatment according to claim 34, wherein the muscular dystrophy patient is a patient with a mutation that is a target of exon 45 to 55 skipping in dystrophin gene.

36. The method for treatment according to claim 34, wherein the patient is a human.

37. The combination according to claim 12, wherein the first to third antisense oligomers are oligonucleotides or morpholino oligomers.

38. A method for treatment of muscular dystrophy, comprising administering to a patient with muscular dystrophy the first to third antisense oligomers according to claim 12, or pharmaceutically acceptable salts thereof, or hydrates thereof.
